(19) United States
(12) Patent Application Publication
(10) Pub. No.: US 2010/0120788 A1
(43) Pub. Date: May 13, 2010

(54) IDENTIFICATION OF POLYNUCLEOTIDES FOR PREDICTING ACTIVITY OF COMPOUNDS THAT INTERACT WITH AND/OR MODULATE PROTEIN TYROSINE KINASES AND/OR PROTEIN TYROSINE KINASE PATHWAYS IN PROSTATE CELLS

(75) Inventors: Xi-De Wang, Newtown, PA (US); Fei Huang, Princeton, NJ (US); Edwin A. Clark, Pennington, NJ (US)

Correspondence Address: LOUIS J. WILLE;BRISTOL-MYERS SQUIBB COMPANY, PATENT DEPARTMENT, P O BOX 4000, PRINCETON, NJ, 08543-4000, US

(73) Assignee: Bristol-Myers Squibb Company

(21) Appl. No.: 12/449,811

(22) PCT Filed: Jan. 8, 2008
(86) PCT No.: PCT/US2008/050495

§ 371 Date: Nov. 23, 2009

Related U.S. Application Data
(60) Provisional application No. 60/879,374, filed on Jan. 9, 2007.
(60) Provisional application No. 60/899,260, filed on Feb. 2, 2007.

(51) Int. Cl. A61K 31/496; C12Q 1/68; C12Q 1/02; C40B 20/00; G01N 33/53; A61P 35/00

(52) U.S. Cl. 514/252.19; 435/6; 435/29; 506/2; 435/7.1

(57) ABSTRACT

The present invention describes polynucleotides that have been discovered to correlate to the relative intrinsic sensitivity or resistance of cells, e.g., prostate cell lines, to treatment with compounds that interact with and modulate, e.g., inhibit, protein tyrosine kinases, such as, for example, members of the Src family of tyrosine kinases, e.g., Src, Fgr, Fyn, Yes, Blk, Hck, Lck and Lyn, as well as other protein tyrosine kinases, including, Bcr-abl, Jak, PDGFR, c-kit and Eph receptors. These polynucleotides have been shown to have utility in predicting the resistance and sensitivity of prostate cell lines to the compounds. The expression level or phosphorylation status of some polynucleotides is regulated by treatment with a particular protein tyrosine kinase inhibitor compound, thus indicating that these polynucleotides are involved in the protein tyrosine kinase signal transduction pathway, e.g., Src tyrosine kinase. Such polynucleotides, whose expression levels correlate highly with drug sensitivity or resistance and which are modulated by treatment with the compounds, comprise polynucleotide predictor or marker sets useful in methods of predicting drug response, and as prognostic or diagnostic indicators in disease management, particularly in those disease areas, e.g., prostate cancer, in which signaling through the protein tyrosine kinase pathway, such as the Src tyrosine kinase pathway, is involved with the disease process.

[0001] This application claims benefit to provisional application U.S. Ser. No. 60/879,374 filed Jan. 9, 2007; and to provisional application U.S. Ser. No. 60/899,260, filed Feb. 2, 2007; under 35 U.S.C. 119(e). The entire teachings of the referenced applications are incorporated herein by reference.

### FIELD OF THE INVENTION

[0002] The present invention relates generally to the field of pharmacogenomics, and more specifically to new and alternative methods and procedures to determine drug sensitivity in patients, and particularly in patients with prostate cancer. This invention allows the development of individualized genetic profiles which aid in treating diseases and disorders based on patient response at a molecular level.

### BACKGROUND OF THE INVENTION

[0003] Prostate cancer is the most common type of cancer in men of western countries. It is estimated that each year about 230,000 men in the US alone are diagnosed with prostate cancer and ˜30,000 die of this disease (1). Although targeted therapeutics have delivered promises for cancer patients, their use in treating prostate cancer is still few. Current regimens available for prostate cancer patients include conventional surgery, radiation and hormonal therapies for early stage tumors, and TAXOL®-based chemotherapy for late stage metastatic tumors (2, 3). There is a clear unmet medical need to develop targeted therapeutics for prostate cancer, and a need for methodologies that can accurately foretell a patient's response to drugs in the clinic and thus facilitate the individualization of therapy for each patient.

[0004] The problem may be solved by the identification of new parameters that can better predict a patient's sensitivity to treatment or therapy. The classification of patient samples is a crucial aspect of cancer diagnosis and treatment. The association of a patient's response to drug treatment with molecular and genetic markers can open up new opportunities for drug development in non-responding patients, or distinguish a drug's indication among other treatment choices because of higher confidence in the efficacy. Further, the pre-selection of patients who are likely to respond well to a medicine, drug, or combination therapy may reduce the number of patients needed in a clinical study or accelerate the time needed to complete a clinical development program (M. Cockett et al., Current Opinion in Biotechnology, 11:602-609 (2000)).

[0005] The major goal of pharmacogenomics research is to identify genetic markers that accurately predict a given patient's response to drugs in the clinic; such individualized genetic assessment would greatly facilitate personalized treatment. An approach of this nature is particularly needed in cancer treatment and therapy, where commonly used agents are ineffective in many patients, and side effects are frequent. The ability to predict drug sensitivity in patients is particularly challenging because drug responses reflect both the properties intrinsic to the target cells and also a host's metabolic properties. Efforts by those in the art to use genetic information to predict drug sensitivity have primarily focused on individual polynucleotides that have broad effects, such as the multidrug resistant polynucleotides, mdr1 and mrp1 (P. Sonneveld, J. Intern. Med., 247:521-534 (2000)).

[0006] The development of microarray technologies for large scale characterization of polynucleotide expression pattern makes it possible to systematically search for multiple molecular markers and to categorize cancers into distinct subgroups that are not evident by traditional histopathological methods (J. Khan et al., Cancer Res., 58:5009-5013 (1998); A. A. Alizadeh et al., Nature, 403:503-511 (2000); M. Bittner et al., Nature, 406:536-540 (2000); J. Khan et al., Nature Medicine, 7(6):673-679 (2001); and T. R. Golub et al., Science, 286:531-537 (1999); U. Alon et al., Proc. Natl. Acad. Sci. USA, 96:6745-6750 (1999)). Such technologies and molecular tools have made it possible to monitor the expression levels of a large number of transcripts within a cell at any given time (see, e.g., Schena et al., Science, 270:467-470 (1995); Lockhart et al., Nature Biotechnology, 14:1675-1680 (1996); Blanchard et al., Nature Biotechnology, 14:1649 (1996); and U.S. Pat. No. 5,569,588, issued Oct. 29, 1996 to Ashby et al.).

[0007] How differential polynucleotide expression is associated with health and disease is a basis of functional genomics, which is defined as the study of all of the polynucleotides expressed by a specific cell or a group of cells and the changes in their expression pattern during development, disease, or environmental exposure. Hybridization arrays, used to study polynucleotide expression, allow polynucleotide expression analysis on a genomic scale by permitting the examination of changes in expression of literally thousands of polynucleotides at one time. In general, for hybridization arrays, gene-specific sequences (probes) are immobilized on a solid state matrix. These sequences are then queried with labeled copies of nucleic acids from biological samples (targets). The underlying theory is that the greater the expression of a gene, the greater the amount of labeled target and thus, the greater output of signal. (W. M. Freeman et al., BioTechniques), 29:1042-1055 (2000)).

[0008] Recent studies have demonstrated that polynucleotide expression information generated by microarray analysis of human tumors can predict clinical outcome (L. J. van't Veer et al., Nature, 415:530-536 (2002); M. West et al., Proc. Natl. Acad. Sci. USA, 98:11462-11467 (2001); T. Sorlie et al., Proc. Natl. Acad. Sci. USA, 98:10869-10874 (2001); M. Shipp et al., Nature Medicine, 8(1):68-74 (2002)). These findings bring hope that cancer treatment will be vastly improved by better predicting the response of individual tumors to therapy.

[0009] Biomarkers can dictate the success of clinical development of novel anti-cancer drugs and the clinical benefits that patients can derive from such specific targeted therapeutics. Using expression of HER2 as a patient selection criteria has allowed the successful development of HERCEPTIN®, a monoclonal antibody therapy targeting HER2 in breast cancer. Breast cancer patients that are identified to over-express HER2 and subsequently receive this therapy show a remarkable response rate and profound clinical benefits (10). In contrast, failure of using robust biomarkers in trials for innovative medicine, e.g., Gefitinib, a small molecule targeting epidermal growth factor receptor (EGFR), resulted in a setback in its clinical development (11, 12), even though its efficacy in inhibiting tumor cell growth in vitro and/or in animal models had been fully demonstrated (13, 14). It has become increasingly important in clinical development to identify molecular biomarkers that could guide patient selection and enable monitoring of drug efficacy at the molecular level.

[0010] Dasatinib is a potent, orally available small molecule inhibitor that targets multiple cytosolic or membrane-bound tyrosine kinases including Src, BCR-Abl, c-kit, PDGFRβ and EphA2 (4, 5). Due to its potency against a large panel of leukemic cancer cell lines harboring BCR-ABL mutations (6) and the clear and imminent need for overcoming the imatinib resistance, this compound has been expedited in investigational trials for leukemias. Based on the profound clinical benefits demonstrated in these trials, dasatinib was recently approved for use in chronic myelogenous leukemia (CML) and Philadelphia chromosome-positive acute lymphoblastic leukemia (ALL) that are resistant or intolerant to imatinib (7). The involvement of Src kinase in a number of cellular processes such as cell migration, adhesion and angiogenesis, participation of Src in a number of pathways such as EGFR, and the potential role of those tyrosine kinase targets in tumorigenesis (8, 9) have prompted investigations for potential use of dasatinib in other types of malignancy including solid tumors.

[0011] Needed in the art are new and alternative methods and procedures to determine drug sensitivity in patients and which are necessary to treat diseases and disorders, particularly cancers such as prostate cancer, based on patient response to protein tyrosine kinase inhibitors at a molecular level. By using cultured cells as a model of in vivo effects, the present invention advantageously focuses on cell-intrinsic properties that are exposed in cell culture and involves identified polynucleotides that correlate with drug sensitivity. The presently described discovery and identification of polynucleotides/marker polynucleotides (predictor polynucleotides and polynucleotide sets) in cell lines assayed in vitro can be used to correlate with drug responses in vivo, and thus can be extended to clinical situations in which the same polynucleotides are used to predict responses to drugs and/or chemotherapeutic agents, including protein tyrosine kinase inhibitors, by patients, with particular regard to prostate cancer patients.

### SUMMARY OF THE INVENTION

[0012] The present invention describes the identification of marker polynucleotides whose expression levels are highly correlated with drug sensitivity in prostate cell lines that are either sensitive or resistant to protein tyrosine kinase inhibitor compounds. More particularly, the protein tyrosine kinases that are inhibited in accordance with the present invention include members of the Src family of tyrosine kinases, for example, Src, Fgr, Fyn, Yes, Blk, Hck, Lck and Lyn, as well as other protein tyrosine kinases, including, Bcr-abl, Jak, PDGFR, c-kit and Eph receptors. For a review of these and other protein tyrosine kinases, see, for example, P. Blume-Jensen and T. Hunter, “Oncopolynucleotide Kinase Signaling”, Nature, 411:355-365 (2001). Some of these polynucleotides are also modulated by the tyrosine kinase inhibitor compounds, in particular, src tyrosine kinase inhibitor compounds, which indicates their involvement in the protein tyrosine kinase signaling pathway. These polynucleotides or “markers” show utility in predicting a host's response to a drug and/or drug treatment.

[0013] It is an aspect of this invention to provide a cell culture model to identify polynucleotides whose expression levels correlate with drug sensitivity of cells associated with a disease state, or with a host having a disease. In accordance with the present invention, oligonucleotide microarrays were utilized to measure the expression levels of a large number of polynucleotides in a panel of untreated cell lines, particularly prostate cell lines, for which drug sensitivity to a protein tyrosine kinase inhibitor compound was determined. The determination of the polynucleotide expression profiles in the untreated cells allowed a prediction of chemosensitivity and the identification of marker polynucleotides whose expression levels highly correlated with sensitivity to drugs or compounds that modulate, preferably inhibit, protein tyrosine kinase or the pathway in which the protein tyrosine kinase, e.g., src tyrosine kinase, is involved. The marker polynucleotides are thus able to be utilized as one or more predictors to foresee a patient's response to drugs or drug treatments that directly or indirectly affect protein tyrosine kinase activity.

[0014] It is another aspect of the present invention to provide a method of determining or predicting if an individual requiring drug or chemotherapeutic treatment or therapy for a disease state, or a cancer or tumor of a particular type, e.g., a prostate cancer or prostate tumor, will successfully respond or will not respond to the drug or chemotherapeutic treatment or therapy prior to the administration of such treatment or chemotherapy. Preferably, the treatment or therapy involves a protein tyrosine kinase modulating agent, e.g., an inhibitor of the protein tyrosine kinase activity. The protein tyrosine kinases whose activities can be inhibited by inhibitor compounds according to this invention include, for example, members of the Src family of tyrosine kinases, for example, Src, Fgr, Fyn, Yes, Blk, Hck, Lck and Lyn, as well as other protein tyrosine kinases, including, Bcr-abl, Jak, PDGFR, c-kit and Eph receptors. Also in accordance with the present invention, cells from a patient tissue sample, e.g., a prostate tumor or cancer biopsy, are assayed to determine their polynucleotide expression pattern prior to treatment with a protein tyrosine kinase modulating compound or drug, preferably a src tyrosine kinase inhibitor. The resulting polynucleotide expression profile of the test cells before exposure to the compound or drug is compared with the polynucleotide expression pattern of the predictor set of polynucleotides that have been described and shown herein (Table 2). In addition, in such a method, the polynucleotide expression pattern of one or more predictor polynucleotides, i.e., such as the 174, 14, 10 and 5 polynucleotide predictor sets as set forth in Tables 2, 3, 4, and 5, respectively, and/or the measurement of polynucleotide expression pattern of uPA, CK5, EPHA2, AR, and/or PSA, individually or any combination thereof, can also be used. These polynucleotides are derived from the control panel of the untreated cells that have been determined to be either resistant or sensitive to the drug or compound.

[0015] Success or failure of treatment with a drug can be determined based on the polynucleotide expression pattern of cells from the test tissue (test cells), e.g., a tumor or cancer biopsy, as being relatively similar to or different from the polynucleotide expression pattern of the predictor set of polynucleotides. Thus, if the test cells show a polynucleotide expression profile which corresponds to that of the predictor set of polynucleotides in the control panel of cells which are sensitive to the drug or compound, it is highly likely or predicted that the individual's cancer or tumor will respond favorably to treatment with the drug or compound. By contrast, if the test cells show a polynucleotide expression pattern corresponding to that of the predictor set of polynucleotides of the control panel of cells which are resistant to the drug or compound, it is highly likely or predicted that the individual's cancer or tumor will not respond to treatment with the drug or compound.

[0016] It is a further aspect of this invention to provide screening assays for determining if a cancer patient will be susceptible or resistant to treatment with a drug or compound, particularly, a drug or compound directly or indirectly involved in a protein tyrosine kinase activity or a protein tyrosine kinase pathway. Such protein tyrosine kinases include, without limitation, members of the Src family of tyrosine kinases, for example, Src, Fgr, Fyn, Yes, Blk, Hck, Lck and Lyn, as well as other protein tyrosine kinases, including, Bcr-abl, Jak, PDGFR, c-kit and Eph receptors.

[0017] In a more particular aspect, the present invention provides screening assays for determining if a cancer patient will be susceptible or resistant to treatment with a drug or compound, particularly, a drug or compound directly or indirectly involved in src tyrosine kinase activity or the src tyrosine kinase pathway.

[0018] It is another aspect of the present invention to provide a method of monitoring the treatment of a patient having a disease treatable by a compound or agent that modulates a protein tyrosine kinase, including members of the Src family of tyrosine kinases, for example, Src, Fgr, Fyn, Yes, Blk, Hck, Lck and Lyn, as well as other protein tyrosine kinases, including, Bcr-abl, Jak, PDGFR, c-kit and Eph receptors. This can be accomplished by comparing the resistance or sensitivity polynucleotide expression profile of cells from a patient tissue sample, e.g., a tumor or cancer biopsy, e.g., a prostate cancer or tumor sample, prior to treatment with a drug or compound that inhibits the protein tyrosine kinase activity and again following treatment with the drug or compound. The isolated test cells from the patient's tissue sample are assayed to determine their polynucleotide expression pattern before and after exposure to a compound or drug, such as, e.g., a src tyrosine kinase inhibitor. The resulting polynucleotide expression profile of the test cells before and after treatment is compared with the polynucleotide expression pattern of the predictor set, predictor subsets, or any one of the predictor polynucleotides individually or any combination thereof. Thus, if a patient's response becomes one that is sensitive to treatment by a protein tyrosine kinase inhibitor compound, based on a correlation of the expression profile of the predictor polynucleotides, the patient's treatment prognosis can be qualified as favorable and treatment can continue. Also, if after treatment with a drug or compound, the test cells do not show a change in their polynucleotide expression profile that corresponds to the control panel of cells that are sensitive to the drug or compound, this can serve as an indicator that the current treatment should be modified, changed, or even discontinued. Such a monitoring process can indicate success or failure of a patient's treatment with a drug or compound, and the monitoring processes can be repeated as necessary or desired.

[0019] It is a further aspect of the present invention to provide predictor polynucleotides and predictor sets of polynucleotides having both diagnostic and prognostic value in disease areas in which signaling through a protein tyrosine kinase or a protein tyrosine kinase pathway is of importance, e.g., in cancers and tumors, in immunological disorders, conditions or dysfunctions, or in disease states in which cell signaling and/or proliferation controls are abnormal or aberrant. Such protein tyrosine kinases whose direct or indirect modulation can be associated with a disease state or condition, include members of the Src family of tyrosine kinases, for example, Src, Fgr, Fyn, Yes, Blk, Hck, Lck and Lyn, as well as other protein tyrosine kinases, including, Bcr-abl, Jak, PDGFR, c-kit and Eph receptors. In accordance with this invention, the use of one or more predictor polynucleotides, or a predictor polynucleotide set or subset (such as the 174, 14, 10 and 5 polynucleotide predictor sets as set forth in Tables 2, 3, 4, and 5, respectively, and/or the measurement of polynucleotide expression pattern of uPA, CK5, EPHA2, AR, and/or PSA, individually or any combination thereof) is to forecast or foretell an outcome prior to having any knowledge about a biological system, or a cellular response.

[0020] It is yet another aspect of the present invention to assemble one or more polynucleotides, such as those listed Tables 2, 3, 4, and 5, respectively, and/or the measurement of polynucleotide expression pattern of uPA, CK5, EPHA2, AR, and/or PSA, individually or any combination thereof, that highly correlate with resistance or sensitivity to protein tyrosine kinase inhibitor drugs or compounds, into predictor polynucleotide sets, so as to predict, or reasonably foretell the effect of either the protein tyrosine inhibitor compounds, or compounds that affect the protein tyrosine kinase signaling pathway(s) in different biological systems, or for cellular responses. The predictor polynucleotide sets can be used in in vitro assays of drug response by test cells to predict in vivo outcome. In accordance with this invention, the various predictor polynucleotide sets described herein, or the combination of these predictor sets with other polynucleotides or other co-variants of these polynucleotides, can be used, for example, to predict how patients with cancer or a tumor might respond to therapeutic intervention with compounds that modulate protein tyrosine kinases, or modulate signaling through an entire protein tyrosine kinase regulatory pathway. The predictor sets of polynucleotides, or co-variants of these polynucleotides, can be used to predict how patients with a cancer or tumor respond to therapy employing compounds that modulate a tyrosine kinase, or the activity of a tyrosine kinase, such as protein tyrosine kinase members of the Src family, for example, Src, Fgr, Fyn, Yes, Blk, Hck, Lck and Lyn, as well as other protein tyrosine kinases, including, Bcr-abl, Jak, PDGFR, c-kit and Eph receptors.

[0021] Another object of the present invention is to provide one or more specialized microarrays, e.g., oligonucleotide microarrays or cDNA microarrays, comprising those polynucleotides or combinations thereof, as described herein, showing expression profiles that correlate with either sensitivity or resistance to protein tyrosine kinase inhibitor compounds. Such microarrays can be employed in in vitro assays for assessing the expression level of the polynucleotides on the microarrays in the test cells from tumor biopsies, for example, and determining whether these test cells will be likely to be resistant or sensitive to the protein tyrosine kinase inhibitor compound(s). For example, a specialized microarray can be prepared using some or all of the polynucleotides, polynucleotide subsets, or combinations thereof, as described herein and shown in Tables 2, 3, 4, and 5, respectively, and/or the measurement of the polynucleotide expression pattern of uPA, CK5, EPHA2, AR, and/or PSA, individually or any combination thereof. Cells from a tissue or organ biopsy can be isolated and exposed to one or more inhibitor compounds. Following application of nucleic acids isolated from both untreated and treated cells to one or more of the specialized microarrays, the pattern of polynucleotide expression of the tested cells can be determined and compared with that of the predictor polynucleotide pattern from the control panel of cells used to create the predictor polynucleotide set on the microarray. Based upon the polynucleotide expression pattern results from the cells undergoing testing, it can be determined if the cells show a resistant or a sensitive profile of polynucleotide expression. Whether or not the tested cells from a tissue or organ biopsy will respond to a protein tyrosine kinase inhibitor compound, and the course of treatment or therapy, can then be determined or evaluated based on the information gleaned from the results of the specialized microarray analysis.

[0022] It is a further aspect of the present invention to provide a kit for determining or predicting drug susceptibility or resistance by a patient having a disease, with particular regard to a cancer or tumor, namely, a prostate cancer or tumor. Such kits are useful in a clinical setting for testing a patient's biopsied tumor or cancer sample, for example, to determine or predict if the patient's tumor or cancer will be resistant or sensitive to a given treatment or therapy with a drug, compound, chemotherapy agent, or biological agent that is directly or indirectly involved with modification, preferably, inhibition, of the activity of a protein tyrosine kinase or a cell signaling pathway involving protein tyrosine kinase activity. Provided in the kit are one or more microarrays, e.g., oligonucleotide microarrays or cDNA microarrays, comprising those polynucleotides that correlate with resistance and sensitivity to protein tyrosine kinase modulators, particularly, inhibitors of members of the Src family of protein tyrosine kinases, for example, Src, Fgr, Fyn, Yes, Blk, Hck, Lck and Lyn, as well as inhibitors of the Bcr-abl, Jak, PDGFR, c-kit and Eph receptors protein tyrosine kinases; and, in suitable containers, the modulator agents/compounds for use in testing cells from patient tissue specimens or patient samples; and instructions for use. In addition, kits contemplated by the present invention can include reagents or materials for the monitoring of the expression of the predictor or marker polynucleotides of the invention at the level of mRNA or protein, using other techniques and systems practiced in the art, e.g., RT-PCR assays, which employ primers designed on the basis of one or more of the predictor polynucleotides described herein, immunoassays, such as enzyme linked immunosorbent assays (ELISAs), immunoblotting, e.g., Western blots, or in situ hybridization, and the like, as further described herein. The kits according to the present invention can also comprise one or more predictor polynucleotides as set forth in Table 2, including subsets of predictor polynucleotides which include, but are not limited to the predictor polynucleotide subsets as presented in such as the 174, 14, 10 and 5 polynucleotide predictor sets set forth in Tables 3, 4, and 5, respectively, and/or the measurement of polynucleotide expression pattern of uPA, CK5, EPHA2, AR, and/or PSA, individually or any combination thereof herein.

[0023] Another aspect of the present invention is to provide one or more polynucleotides among those of the predictor polynucleotides identified herein that can serve as targets for the development of drug therapies for disease treatment. Such targets can be particularly applicable to treatment of prostate disease, such as prostate cancers or tumors. Because these predictor polynucleotides are differentially expressed in sensitive and resistant cells, their expression pattern is correlated with the relative intrinsic sensitivity of cells to treatment with compounds that interact with and/or inhibit protein tyrosine kinases, including members of the Src family of protein tyrosine kinases, for example, Src, Fgr, Fyn, Yes, Blk, Hck, Lck and Lyn, as well as the Bcr-abl, Jak, PDGFR, c-kit and Eph receptors protein tyrosine kinases. Accordingly, the polynucleotides highly expressed in resistant cells can serve as targets for the development of new drug therapies for those tumors which are resistant to protein tyrosine kinase inhibitor compounds.

[0024] Yet another object of the present invention is to provide antibodies, either polyclonal or monoclonal, directed against one or more of the protein tyrosine kinase biomarker polypeptides, or peptides thereof, encoded by the predictor polynucleotides. Such antibodies can be used in a variety of ways, for example, to purify, detect, and target the protein tyrosine kinase biomarker polypeptides of the present invention, including both in vitro and in vivo diagnostic, detection, screening, and/or therapeutic methods, and the like. Included among the protein tyrosine kinase biomarker polypeptides of this invention are members of the Src family of protein tyrosine kinases, for example, Src, Fgr, Fyn, Yes, Blk, Hck, Lck and Lyn, as well as the Bcr-abl, Jak, PDGFR, c-kit and Eph receptors protein tyrosine kinases.

[0025] Yet another object of the present invention is to provide antisense reagents, including siRNA, RNAi, and ribozyme reagents, directed against one or more of the protein tyrosine kinase biomarker polypeptides, or peptides thereof, encoded by the predictor polynucleotides. Such antisense reagents can be used in a variety of ways, for example, to detect, to target, and inhibit the expression of the protein tyrosine kinase biomarker polypeptides of the present invention, including both in vitro and in vivo diagnostic, detection, screening, and/or therapeutic methods, and the like. Included among the protein tyrosine kinase biomarker polypeptides of this invention are members of the Src family of protein tyrosine kinases, for example, Src, Fgr, Fyn, Yes, Blk, Hck, Lck and Lyn, as well as the Bcr-abl, Jak, PDGFR, c-kit and Eph receptors protein tyrosine kinases.

[0026] The invention also relates to an antisense compound at least 8 to 30 nucleotides in length that specifically hybridizes to a nucleic acid molecule encoding the human protein tyrosine kinase biomarker polypeptides of the present invention, wherein said antisense compound inhibits the expression of the human protein tyrosine kinase biomarker polypeptides.

[0027] The invention further relates to a method of inhibiting the expression of the human protein tyrosine kinase biomarker polypeptides of the present invention in human cells or tissues comprising contacting said cells or tissues in vitro, or in vivo, with an antisense compound of the present invention so that expression of the protein tyrosine kinase biomarker polypeptides is inhibited.

[0028] The present invention is also directed to a method of identifying a compound that modulates the biological activity of protein tyrosine kinase biomarker polypeptides, comprising the steps of: (a) combining a candidate modulator compound with protein tyrosine kinase biomarker polypeptides in the presence of an antisense molecule that antagonizes the activity of the protein tyrosine kinase biomarker polypeptides, and (b) identifying candidate compounds that reverse the antagonizing effect of the peptide.

[0029] The present invention is also directed to a method of identifying a compound that modulates the biological activity of protein tyrosine kinase biomarker polypeptides, comprising the steps of: (a) combining a candidate modulator compound with protein tyrosine kinase biomarker polypeptides in the presence of a small molecule that antagonizes the activity of the protein tyrosine kinase biomarker polypeptides, and (b) identifying candidate compounds that reverse the antagonizing effect of the peptide.

[0030] The present invention is also directed to a method of identifying a compound that modulates the biological activity of protein tyrosine kinase biomarker polypeptides, comprising the steps of: (a) combining a candidate modulator compound with protein tyrosine kinase biomarker polypeptides in the presence of a small molecule that agonizes the activity of the protein tyrosine kinase biomarker polypeptides, and (b) identifying candidate compounds that reverse the agonizing effect of the peptide.

[0031] The present invention is also directed to a predictor set comprising a plurality of polynucleotides whose expression pattern is predictive of the response of cells to treatment with a compound that modulates protein tyrosine kinase activity or members of the protein tyrosine kinase pathway; wherein the polynucleotides are selected from the group consisting of: the polynucleotides provided in Table 2; the sensitive predictor polynucleotides provided in Table 2; and the resistant predictor polynucleotides provided in Table 2.

[0032] The present invention is also directed to a predictor set comprising a plurality of polynucleotides whose expression pattern is predictive of the response of cells to treatment with a compound that modulates protein tyrosine kinase activity or members of the protein tyrosine kinase pathway; wherein the polynucleotides are selected from the group consisting of: the polynucleotides provided in Table 2; the sensitive predictor polynucleotides provided in Table 2; the resistant predictor polynucleotides provided in Table 2; one or more of uPA, CK5, EPHA2, AR, and/or PSA, individually or any combination thereof, wherein the plurality of polynucleotides comprise the number of polynucleotides selected from the group consisting of: at least about 1 polynucleotides; at least about 2 polynucleotides; at least about 3 polynucleotides; at least about 4 polynucleotides; at least about 5 polynucleotides; at least about 6 polynucleotides; at least about 7 polynucleotides; at least about 10 polynucleotides; at least about 15 polynucleotides; at least about 20 polynucleotides; at least about 25 polynucleotides; and at least about 30 polynucleotides.

[0033] The present invention is also directed to a predictor set comprising a plurality of polynucleotides whose expression pattern is predictive of the response of cells to treatment with a compound that modulates protein tyrosine kinase activity or members of the protein tyrosine kinase pathway; wherein the polynucleotides are selected from the group consisting of: the polynucleotides provided in Table 2; the sensitive predictor polynucleotides provided in Table 2; the resistant predictor polynucleotides provided in Table 2, one or more of uPA, CK5, EPHA2, AR, and/or PSA, individually or any combination thereof; wherein the plurality of polynucleotides comprise the number of polynucleotides selected from the group consisting of: at least about 1 polynucleotides; at least about 2 polynucleotides; at least about 3 polynucleotides; at least about 4 polynucleotides; at least about 5 polynucleotides; at least about 6 polynucleotides; at least about 7 polynucleotides; at least about 10 polynucleotides; at least about 15 polynucleotides; at least about 20 polynucleotides; at least about 25 polynucleotides; and at least about 30 polynucleotides; wherein the plurality of polynucleotides comprise a member of the group consisting of: the polynucleotides provided in Table 3; the sensitive predictor polynucleotides provided in Table 3; the resistant predictor polynucleotides provided in Table 3; the polynucleotides provided in Table 4; the sensitive predictor polynucleotides provided in Table 4; the resistant predictor polynucleotides provided in Table 4; the polynucleotides provided in Table 5; the sensitive predictor polynucleotides provided in Table 5; and the resistant predictor polynucleotides provided in Table 5.

[0034] The present invention is also directed to a predictor set comprising a plurality of polynucleotides whose expression pattern is predictive of the response of cells to treatment with a compound that modulates protein tyrosine kinase activity or members of the protein tyrosine kinase pathway; wherein the polynucleotides are selected from the group consisting of: the polynucleotides provided in Table 2; the sensitive predictor polynucleotides provided in Table 2; and the resistant predictor polynucleotides provided in Table 2; wherein the plurality of polynucleotides comprise the number of polynucleotides selected from the group consisting of: at least about 1 polynucleotides; at least about 2 polynucleotides; at least about 3 polynucleotides; at least about 4 polynucleotides; at least about 5 polynucleotides; at least about 6 polynucleotides; at least about 7 polynucleotides; at least about 10 polynucleotides; at least about 15 polynucleotides; at least about 20 polynucleotides; at least about 25 polynucleotides; and at least about 30 polynucleotides; wherein the plurality of polynucleotides comprise a member of the group consisting of: the polynucleotides provided in Table 3; the sensitive predictor polynucleotides provided in Table 3; the resistant predictor polynucleotides provided in Table 3; the polynucleotides provided in Table 4; the sensitive predictor polynucleotides provided in Table 4; the resistant predictor polynucleotides provided in Table 4; the polynucleotides provided in Table 5; the sensitive predictor polynucleotides provided in Table 5; the resistant predictor polynucleotides provided in Table 5, and any one or more uPA, CK5, EPHA2, AR, and/or PSA, individually or any combination thereof; wherein the compound is selected from the group consisting of: antisense reagents directed to said polynucleotides, or one or more members of the protein tyrosine kinase pathway; RNAi reagents directed to said polynucleotides, or one or more members of the protein tyrosine kinase pathway; antibodies directed against polypeptides encoded by said polynucleotides, or one or more members of the protein tyrosine kinase pathway; and small molecule compounds.

[0035] The present invention is also directed to a predictor set comprising a plurality of polynucleotides whose expression pattern is predictive of the response of cells to treatment with a compound that modulates protein tyrosine kinase activity or members of the protein tyrosine kinase pathway; wherein the polynucleotides are selected from the group consisting of: the polynucleotides provided in Table 2; the sensitive predictor polynucleotides provided in Table 2; the resistant predictor polynucleotides provided in Table 2, and any one or more of uPA, CK5, EPHA2, AR, and/or PSA, individually or any combination thereof; wherein the plurality of polynucleotides comprise the number of polynucleotides selected from the group consisting of: at least about 1 polynucleotides; at least about 2 polynucleotides; at least about 3 polynucleotides; at least about 4 polynucleotides; at least about 5 polynucleotides; at least about 6 polynucleotides; at least about 7 polynucleotides; at least about 10 polynucleotides; at least about 15 polynucleotides; at least about 20 polynucleotides; at least about 25 polynucleotides; and at least about 30 polynucleotides; wherein the plurality of polynucleotides comprise a member of the group consisting of: the polynucleotides provided in Table 3; the sensitive predictor polynucleotides provided in Table 3; the resistant predictor polynucleotides provided in Table 3; the polynucleotides provided in Table 4; the sensitive predictor polynucleotides provided in Table 4; the resistant predictor polynucleotides provided in Table 4; the polynucleotides provided in Table 5; the sensitive predictor polynucleotides provided in Table 5; and the resistant predictor polynucleotides provided in Table 5, wherein the compound is selected from the group consisting of: antisense reagents directed to said polynucleotides, or one or more members of the protein tyrosine kinase pathway; RNAi reagents directed to said polynucleotides, or one or more members of the protein tyrosine kinase pathway; antibodies directed against polypeptides encoded by said polynucleotides, or one or more members of the protein tyrosine kinase pathway; and small molecule compounds; wherein the compound is BMS-A.

[0036] A predictor set according to the present invention wherein said cells are a member of the group consisting of: cancer cells, prostate cells, prostate cancer cells, breast cells, breast cancer cells, lung cells, lung cancer cells.

[0037] The present invention is also directed to a predictor set comprising a plurality of polypeptides whose expression pattern is predictive of the response of cells to treatment with compounds that modulate protein tyrosine kinase activity or members of the protein tyrosine kinase pathway.

[0038] The present invention is also directed to a predictor set comprising a plurality of polypeptides whose expression pattern is predictive of the response of cells to treatment with compounds that modulate protein tyrosine kinase activity or members of the protein tyrosine kinase pathway; wherein the polypeptides are selected from the group consisting of: the polypeptides provided in Table 2; the sensitive predictor polypeptides provided in Table 2; the resistant predictor polypeptides provided in Table 2; the polypeptides provided in Table 3; the sensitive predictor polypeptides provided in Table 3; the resistant predictor polypeptides provided in Table 3; the polypeptides provided in Table 4; the sensitive predictor polypeptides provided in Table 4; the resistant predictor polypeptides provided in Table 4; the polypeptides provided in Table 5; the sensitive predictor polypeptides provided in Table 5; the resistant predictor polypeptides provided in Table 5; and any one or more of uPA, CK5, EPHA2, AR, and/or PSA polypeptides, individually or any combination thereof.

[0039] The present invention is also directed to a predictor set comprising a plurality of polypeptides whose expression pattern is predictive of the response of cells to treatment with compounds that modulate protein tyrosine kinase activity or members of the protein tyrosine kinase pathway; wherein the polypeptides are selected from the group consisting of: the polypeptides provided in Table 2; the sensitive predictor polypeptides provided in Table 2; the resistant predictor polypeptides provided in Table 2; and any one or more of uPA, CK5, EPHA2, AR, and/or PSA polypeptide, individually or any combination thereof wherein the plurality of polypeptides comprise the number of polypeptides selected from the group consisting of: at least about 1 polypeptides; at least about 2 polypeptides at least about 3 polypeptides; at least about 4 polypeptides at least about 5 polypeptides; at least about 6 polypeptides at least about 7 polypeptides; at least about 10 polypeptides; at least about 15 polypeptides; at least about 20 polypeptides; at least about 25 polypeptides; and at least about 30 polypeptides.

[0040] The present invention is also directed to a predictor set comprising a plurality of polypeptides whose expression pattern is predictive of the response of cells to treatment with compounds that modulate protein tyrosine kinase activity or members of the protein tyrosine kinase pathway; wherein the polypeptides are selected from the group consisting of: the polypeptides provided in Table 2; the sensitive predictor polypeptides provided in Table 2; the resistant predictor polypeptides provided in Table 2; and any one or more of uPA, CK5, EPHA2, AR, and/or PSA polypeptide, individually or any combination thereof wherein the plurality of polypeptides comprise the number of polypeptides selected from the group consisting of: at least about 1 polypeptides; at least about 2 polypeptides at least about 3 polypeptides; at least about 4 polypeptides at least about 5 polypeptides; at least about 6 polypeptides at least about 7 polypeptides; at least about 10 polypeptides; at least about 15 polypeptides; at least about 20 polypeptides; at least about 25 polypeptides; and at least about 30 polypeptides; wherein the plurality of polypeptides comprise a member of the group consisting of: polypeptides provided in Table 3; the sensitive predictor polypeptides provided in Table 3; the resistant predictor polypeptides provided in Table 3; the polypeptides provided in Table 4; the sensitive predictor polypeptides provided in Table 4; the resistant predictor polypeptides provided in Table 4; the polypeptides provided in Table 5; the sensitive predictor polypeptides provided in Table 5; and the resistant predictor polypeptides provided in Table 5.

[0041] The present invention is also directed to a predictor set comprising a plurality of polypeptides whose expression pattern is predictive of the response of cells to treatment with compounds that modulate protein tyrosine kinase activity or members of the protein tyrosine kinase pathway; wherein the polypeptides are selected from the group consisting of: the polypeptides provided in Table 2; the sensitive predictor polypeptides provided in Table 2; the resistant predictor polypeptides provided in Table 2; and any one or more of uPA, CK5, EPHA2, AR, and/or PSA polypeptide, individually or any combination thereof; wherein the plurality of polypeptides comprise the number of polypeptides selected from the group consisting of: at least about 1 polypeptides; at least about 2 polypeptides at least about 3 polypeptides; at least about 4 polypeptides at least about 5 polypeptides; at least about 6 polypeptides at least about 7 polypeptides; at least about 10 polypeptides; at least about 15 polypeptides; at least about 20 polypeptides; at least about 25 polypeptides; and at least about 30 polypeptides; wherein the plurality of polypeptides comprise a member of the group consisting of: polypeptides provided in Table 3; the sensitive predictor polypeptides provided in Table 3; the resistant predictor polypeptides provided in Table 3; the polypeptides provided in Table 4; the sensitive predictor polypeptides provided in Table 4; the resistant predictor polypeptides provided in Table 4; the polypeptides provided in Table 5; the sensitive predictor polypeptides provided in Table 5; and the resistant predictor polypeptides provided in Table 5; wherein the compound is selected from the group consisting of: antisense reagents directed against polynucleotides encoding said polypeptides, or one or more members of the protein tyrosine kinase pathway; antibodies directed against said polypeptides, or one or more members of the protein tyrosine kinase pathway; and small molecule compounds.

[0042] The present invention is also directed to a predictor set comprising a plurality of polypeptides whose expression pattern is predictive of the response of cells to treatment with compounds that modulate protein tyrosine kinase activity or members of the protein tyrosine kinase pathway; wherein the polypeptides are selected from the group consisting of: the polypeptides provided in Table 2; the sensitive predictor polypeptides provided in Table 2; the resistant predictor polypeptides provided in Table 2; and any one or more of uPA, CK5, EPHA2, AR, and/or PSA, individually or any combination thereof, wherein the plurality of polypeptides comprise the number of polypeptides selected from the group consisting of: at least about 1 polypeptides; at least about 2 polypeptides at least about 3 polypeptides; at least about 4 polypeptides at least about 5 polypeptides; at least about 6 polypeptides at least about 7 polypeptides; at least about 10 polypeptides; at least about 15 polypeptides; at least about 20 polypeptides; at least about 25 polypeptides; and at least about 30 polypeptides; wherein the plurality of polypeptides comprise a member of the group consisting of: polypeptides provided in Table 3; the sensitive predictor polypeptides provided in Table 3; the resistant predictor polypeptides provided in Table 3; the polypeptides provided in Table 4; the sensitive predictor polypeptides provided in Table 4; the resistant predictor polypeptides provided in Table 4; the polypeptides provided in Table 5; the sensitive predictor polypeptides provided in Table 5; and the resistant predictor polypeptides provided in Table 5; wherein the compound is selected from the group consisting of: antisense reagents directed against polynucleotides encoding said polypeptides, or one or more members of the protein tyrosine kinase pathway; antibodies directed against said polypeptides, or one or more members of the protein tyrosine kinase pathway; and small molecule compounds; wherein the compound is BMS-A.

[0043] The present invention is also directed to a method for predicting whether a compound is capable of modulating the activity of cells, comprising the steps of: obtaining a sample of cells; determining whether said cells express a plurality of markers; and correlating the expression of said markers to the compounds ability to modulate the activity of said cells.

[0044] The present invention is also directed to a method for predicting whether a compound is capable of modulating the activity of cells, comprising the steps of: obtaining a sample of cells; determining whether said cells express a plurality of markers; and correlating the expression of said markers to the compounds ability to modulate the activity of said cells wherein the plurality of markers are polynucleotides.

[0045] The present invention is also directed to a method for predicting whether a compound is capable of modulating the activity of cells, comprising the steps of: obtaining a sample of cells; determining whether said cells express a plurality of markers; and correlating the expression of said markers to the compounds ability to modulate the activity of said cells wherein the plurality of markers are polynucleotides; wherein the polynucleotides, compounds, and cells are the polynucleotides, compounds, and cells disclosed herein.

[0046] The present invention is also directed to a method for predicting whether a compound is capable of modulating the activity of cells, comprising the steps of: obtaining a sample of cells; determining whether said cells express a plurality of markers; and correlating the expression of said markers to the compounds ability to modulate the activity of said cells wherein the plurality of markers are polypeptides.

[0047] The present invention is also directed to a plurality of cell lines for identifying polynucleotides and polypeptides whose expression levels correlate with compound sensitivity or resistance of cells associated with a disease state; wherein said cell lines are prostate cancer cell lines, breast cancer cell lines, or lung cancer cell lines.

[0048] The present invention is also directed to a method of identifying polynucleotides and polypeptides that predict compound sensitivity or resistance of cells associated with a disease state, comprising the steps of: subjecting the plurality of cell lines to one or more compounds; analyzing the expression pattern of a microarray of polynucleotides or polypeptides; and selecting polynucleotides or polypeptides that predict the sensitivity or resistance of cells associated with a disease state by using said expression pattern of said microarray; wherein said compounds are compounds disclosed herein, and wherein said disease is prostate cancer, breast cancer, and/or lung cancer.

[0049] The present invention is also directed to a method for predicting whether an individual requiring treatment for a disease state, will successfully respond or will not respond to said treatment comprising the steps of: obtaining a sample of cells from said individual; determining whether said cells express a plurality of markers; and correlating the expression of said markers to the individuals ability to respond to said treatment.

[0050] The present invention is also directed to a method for predicting whether an individual requiring treatment for a disease state, will successfully respond or will not respond to said treatment comprising the steps of: obtaining a sample of cells from said individual; determining whether said cells express a plurality of markers; and correlating the expression of said markers to the individuals ability to respond to said treatment; wherein the plurality of markers are polynucleotides; wherein the polynucleotides, and compounds are disclosed herein.

[0051] The present invention is also directed to a method for predicting whether an individual requiring treatment for a disease state, will successfully respond or will not respond to said treatment comprising the steps of: obtaining a sample of cells from said individual; determining whether said cells express a plurality of markers; and correlating the expression of said markers to the individuals ability to respond to said treatment; wherein the plurality of markers are polypeptides; wherein the polypeptides, and compounds are disclosed herein.

[0052] The present invention is also directed to a method of screening for candidate compounds capable of binding to and/or modulating the activity of a protein tyrosine kinase biomarker polypeptide, comprising contacting a test compound with a polypeptide described herein; and selecting as candidate compounds those test compounds that bind to and/or modulate activity of the polypeptide.

[0053] The present invention is also directed to a method of treating prostate cancer in a subject, comprising administering a modulator of one or more protein tyrosine kinase biomarker polypeptides, wherein said polypeptide(s) is selected from the group consisting of: polypeptides provided in Table 2; the sensitive predictor polypeptides provided in Table 2; the resistant predictor polypeptides provided in Table 2; polypeptides provided in Table 3; the sensitive predictor polypeptides provided in Table 3; the resistant predictor polypeptides provided in Table 3; the polypeptides provided in Table 4; the sensitive predictor polypeptides provided in Table 4; the resistant predictor polypeptides provided in Table 4; the polypeptides provided in Table 5; the sensitive predictor polypeptides provided in Table 5; the resistant predictor polypeptides provided in Table 5; and any one or more of uPA, CK5, EPHA2, AR, and/or PSA, individually or any combination thereof.

[0054] The present invention is also directed to a method of predicting whether patients may be resistant to a protein tyrosine kinase inhibitor, such as N-(2-chloro-6-methylphenyl)-2-[[6-[4-(2-hydroxyethyl)-1-piperazinyl]-2-methyl-4-pyrimidinyl]amino]-5-thiazolecarboxamide, by measuring the expression level of kallikrein 3 and androgen receptor in a patient sample, wherein an elevated expression level (e.g., about 2-fold or more above standard) of kallikrein 3 and/or androgen receptor relative to the level observed in a standard sample, is indicative of at least partial resistance to said protein tyrosine kinase inhibitor, and wherein decreased expression (e.g., about 2-fold or more less than standard) of kallikrein 3 and/or androgen receptor relative to the level observed in a standard sample, is indicative of sensitivity to said protein tyrosine kinase inhibitor. The expression profiling measurement may be at either the mRNA or protein level.

[0055] The present invention is also directed to a method of predicting whether patients may be resistant to a protein tyrosine kinase inhibitor, such as N-(2-chloro-6-methylphenyl)-2-[[6-[4-(2-hydroxyethyl)-1-piperazinyl]-2-methyl-4-pyrimidinyl]amino]-5-thiazolecarboxamide, by measuring the expression level of cytokeratin 5 in a patient sample, wherein a decreased expression level of cytokeratin 5 relative to the level observed in a standard sample (e.g., about 2-fold or more below standard), is indicative of at least partial resistance to said protein tyrosine kinase inhibitor, and wherein elevated expression of cytokeratin 5 relative to the level observed in a standard sample, is indicative of sensitivity to said protein tyrosine kinase inhibitor. The expression profiling measurement may be at either the mRNA or protein level.

[0056] The present invention is also directed to a method of predicting whether patients may be resistant to a protein tyrosine kinase inhibitor, such as N-(2-chloro-6-methylphenyl)-2-[[6-[4-(2-hydroxyethyl)-1-piperazinyl]-2-methyl-4-pyrimidinyl]amino]-5-thiazolecarboxamide, by determining whether a patient sample shows signs of basal cell type phenotype for the prostatic cell lineage, wherein the presence of such signs is indicative of sensitivity to said protein tyrosine kinase inhibitor. Such signs may constitute expression profile signatures of such a phenotype, cellular morphology, histochemical signature, or other sign known in the art to be associated with basal cell type phenotype for the prostatic cell lineage.

[0057] The present invention is also directed to a method of predicting whether patients may be resistant to a protein tyrosine kinase inhibitor, such as N-(2-chloro-6-methylphenyl)-2-[[6-[4-(2-hydroxyethyl)-1-piperazinyl]-2-methyl-4-pyrimidinyl]amino]-5-thiazolecarboxamide, by measuring the expression level of kallikrein 3, androgen receptor, and cytokeratin 5 in a patient sample, wherein an elevated expression level of kallikrein 3 and/or androgen receptor relative to the level observed in a standard sample (e.g., about 2-fold or more above standard) accompanied by a decreased expression level of cytokeratin 5 relative to the level observed in a standard sample (e.g., about 2-fold or more below standard), is indicative of at least partial resistance to said protein tyrosine kinase inhibitor, and wherein decreased expression of kallikrein 3 and/or androgen receptor relative to the level observed in a standard sample (e.g., about 2-fold or more below standard) accompanied by an elevated expression level of cytokeratin 5 relative to the level observed in a standard sample (e.g., about 2-fold or more above standard), is indicative of sensitivity to said protein tyrosine kinase inhibitor. The expression profiling measurement may be at either the mRNA or protein level.

[0058] The present invention is also directed to a method of predicting whether patients may be resistant to a protein tyrosine kinase inhibitor, such as N-(2-chloro-6-methylphenyl)-2-[[6-[4-(2-hydroxyethyl)-1-piperazinyl]-2-methyl-4-pyrimidinyl]amino]-5-thiazolecarboxamide, by measuring the expression level of SCEL, ANXA3, CST6, LAMC2, ZBED2, EREG, AXL, FHL2, PLAU, and/or ARNTL2 in a patient sample, wherein a decreased expression level of SCEL, ANXA3, CST6, LAMC2, ZBED2, EREG, AXL, FHL2, PLAU, and/or ARNTL2 relative to the level observed in a standard sample (e.g., about 2-fold or more below standard), is indicative of at least partial resistance to said protein tyrosine kinase inhibitor, and wherein elevated expression of SCEL, ANXA3, CST6, LAMC2, ZBED2, EREG, AXL, FHL2, PLAU, and/or ARNTL2 relative to the level observed in a standard sample (e.g., about 2-fold or more above standard), is indicative of sensitivity to said protein tyrosine kinase inhibitor. The expression profiling measurement may be at either the mRNA or protein level.

[0059] The present invention is also directed to a method of predicting whether patients may be resistant to a protein tyrosine kinase inhibitor, such as N-(2-chloro-6-methylphenyl)-2-[[6-[4-(2-hydroxyethyl)-1-piperazinyl]-2-methyl-4-pyrimidinyl]amino]-5-thiazolecarboxamide, by measuring the expression level of EPHA2 in a patient sample, wherein a decreased expression level of EPHA2 relative to the level observed in a standard sample (e.g., about 2-fold or more below standard), is indicative of at least partial resistance to said protein tyrosine kinase inhibitor, and wherein elevated expression of EPHA2 relative to the level observed in a standard sample (e.g., about 2-fold or more above standard), is indicative of sensitivity to said protein tyrosine kinase inhibitor. The expression profiling measurement may be at either the mRNA or protein level.

[0060] The present invention is also directed to a method of predicting whether patients may be resistant to a protein tyrosine kinase inhibitor, such as N-(2-chloro-6-methylphenyl)-2-[[6-[4-(2-hydroxyethyl)-1-piperazinyl]-2-methyl-4-pyrimidinyl]amino]-5-thiazolecarboxamide, by measuring the expression level of UPA in a patient sample, wherein a decreased expression level of UPA relative to the level observed in a standard sample (e.g., about 2-fold or more below standard), is indicative of at least partial resistance to said protein tyrosine kinase inhibitor, and wherein elevated expression of UPA relative to the level observed in a standard sample (e.g., about 2-fold or more above standard), is indicative of sensitivity to said protein tyrosine kinase inhibitor. The expression profiling measurement may be at either the mRNA or protein level.

[0061] The present invention is also directed to a method of using a surrogate marker to predict the responsiveness of a patient suffering from cancer to a protein tyrosine kinase inhibitor, comprising the step of comparing the expression level of a predictive polynucleotide or polypeptide marker both prior to and subsequent to the administration of a protein tyrosine kinase inhibitor, such as N-(2-chloro-6-methylphenyl)-2-[[6-[4-(2-hydroxyethyl)-1-piperazinyl]-2-methyl-4-pyrimidinyl]amino]-5-thiazolecarboxamide, wherein a decrease in expression of said predictive marker subsequent to said administration relative to the absence of said administration is indicative of said patient being responsive to said protein tyrosine kinase inhibitor, wherein said predictive marker is represented by one or more sensitive markers provided in Table 2, 3, 4, or 5, including, but not limited to SCEL, ANXA3, CST6, LAMC2, ZBED2, EREG, AXL, FHL2, PLAU, and/or ARNTL2.

[0062] The present invention is also directed to a method of using a surrogate marker to predict the responsiveness of a patient suffering from cancer to a protein tyrosine kinase inhibitor, comprising the step of comparing the expression level of a predictive polynucleotide or polypeptide marker both prior to and subsequent to the administration of a protein tyrosine kinase inhibitor, such as N-(2-chloro-6-methylphenyl)-2-[[6-[4-(2-hydroxyethyl)-1-piperazinyl]-2-methyl-4-pyrimidinyl]amino]-5-thiazolecarboxamide, wherein a decrease in expression of said predictive marker subsequent to said administration relative to the absence of said administration is indicative of said patient being responsive to said protein tyrosine kinase inhibitor, wherein said predictive marker is represented by one or more sensitive markers provided in Table 2, 3, 4, or 5, including, but not limited to SCEL, ANXA3, CST6, LAMC2, ZBED2, EREG, AXL, FHL2, PLAU, and/or ARNTL2.

[0063] The present invention is also directed to a method of determining an efficacious dose of a protein tyrosine kinase inhibitor, comprising the step of comparing the expression level of a predictive sensitive polynucleotide or polypeptide marker both prior to and subsequent to the administration of a protein tyrosine kinase inhibitor, such as N-(2-chloro-6-methylphenyl)-2-[[6-[4-(2-hydroxyethyl)-1-piperazinyl]-2-methyl-4-pyrimidinyl]amino]-5-thiazolecarboxamide, wherein a decrease in expression of said predictive marker to a specified level below the standard expression level is indicative of said patient reaching an efficacious dose of said protein tyrosine kinase inhibitor, wherein said predictive sensitive marker is represented by one or more sensitive markers provided in Table 2, 3, 4, or 5, including, but not limited to SCEL, ANXA3, CST6, LAMC2, ZBED2, EREG, AXL, FHL2, PLAU, and/or ARNTL2.

[0064] Further aspects, features, and advantages of the present invention will be better appreciated upon a reading of the detailed description of the invention when considered in connection with the accompanying figures or drawings.

### DESCRIPTION OF THE FIGURES

[0065] FIG. 1. Identification of biomarkers correlated with sensitivity to dasatinib. (A) Discovery strategy to identify potential predictive and surrogate biomarkers. (B) IC₅₀ determination and sensitivity classification of 16 prostate cancer cell lines to dasatinib. (C) Cluster analysis showing the relative expression pattern of 174 genes that were highly correlated with dasatinib sensitivity/resistance classification of 16 cell lines. The dasatinib-sensitive cell lines were highlighted in red, and the position of three important prostatic cell markers CK5, PSA and AR were marked on the heatmap. These genes have differential expression of more than 3-fold between the sensitive and resistant groups. (D) Relative baseline gene expression of CK5, PSA and AR in the 16 cell lines. The resistant cells are in black and sensitive cells are in red. The values on X-axes are expression level in log₂-scale.

[0066] FIG. 2. Correlation of EphA2 gene expression with sensitivity to dasatinib. (A) Negative correlation between the expression levels of EphA2 () and the IC₅₀ (♦) values for the 16 cell lines. The coefficient of Pearson correlation is −0.66, indicating a high reverse correlation. (B) Expression of EphA2 protein in 5 sensitive and 3 resistant cell lines. Overall, the protein expression levels in these cell lines correlated well with the mRNA levels detected with microarray.

[0067] FIG. 3. PLAU gene expression and regulation by dasatinib analyzed at mRNA and protein levels. (A) Differential baseline expression of PLAU gene between resistant (R, in black) and sensitive (S, in red) cell lines. The X-values are the expression level in log₂-scale. The resistant cell line expressing high level of PLAU was WPMY1 and the sensitive cell line expressing low level of PLAU was LNCaP. (B) Down-regulation of PLAU mRNA level by dasatinib-treatment in 5 sensitive cell lines. The cells were treated with 100 nM dasatinib (+D) or DMSO (Ctrl) for 48 hours. The p value was 0.048 in paired t-test, indicating a significant reduction of PLAU mRNA following dasatinib treatment. (C) Correlation between dasatinib-induced PLAU mRNA down-regulation with the sensitivity of cell lines to dasatinib. In addition to those 5 sensitive cells, three dasatinib-resistant cell lines 22Rv, MDAPCa2b, and VCaP were also treated with dasatinib same as in FIG. 3B. The extent of PLAU down-regulation by dasatinib (Y-axis) was negatively correlated with the log₂IC₅₀ values (X-axis) of these 8 cell lines. (D) Dose-dependent down-regulation of PLAU mRNA expression in PC3 cells. Cells were treated with or without different concentrations of dasatinib for 4 or 24 hours. The PLAU expression level relative to control was shown in Y-axis. (E) Dose-dependent inhibition of secreted uPA protein in PC3 cells by dasatinib but not by TAXOL®. Cells were treated with different doses of dasatinib, TAXOL® or DMSO for 24 hours. The amount of uPA protein secreted into the culture medium by 50,000 viable cells was assessed by ELISA assay.

[0068] FIG. 4. Expression pattern of a five-gene model in prostate cell lines and tumors. (A) Hierarchical clustering of five genes AR, PSA, CK5, PLAU, and EphA2 in prostate cell lines. AR and PSA are two luminal cell markers, and CK5 (KRT5) is a basal cell marker. The resistant cell lines were separated from majority of sensitive cells (labeled in red) by these five genes. Note the high expression of CK5 and/or PLAU, EphA2 expression in sensitive cells and the nearly opposite expression pattern in resistant cells. (B) Expression pattern of these 5 genes in 52 prostate tumors. The gene expression of this published data set were profiled on AFFYMETRIX® HG-U95 gene chips. Two AR, three PSA probe sets and one CK5, PLAU and EphA2 probe set are available on the chip and were retrieved for cluster analysis. The tumors samples exhibiting dasatinib-sensitive pattern, i.e., with low AR and PSA expression and high KRT5 and/or PLAU, EphA2 expression were highlighted in red.

[0069] FIG. 5. Use of uPA expression levels as a surrogate for predicting tumor sensitivity to BMS-A. uPA protein level in the plasma of mice bearing PC3 xenograft tumors in the absence or presence of dasatinib was measured. Xenograft tumors were established subcutaneously in nu/nu athymic mice. The mice were divided into three groups each with 8 mice after tumors had reached approximately 200 mg. Two groups were treated with dasatinib at 15 or 30 mg/kg respectively, and the third group as control did not receive dasatinib. Dasatinib was administered orally twice a day on a 5-day-on 2-day-off schedule for 20 doses. The tumor size measurement and blood sampling were performed prior to treatment and weekly for two weeks after treatment initiation. As shown, there was a concordance between BMS-A-dependent uPA expression level modulation with tumor xenograft growth. Experiments were performed as described in Example 2.

### DESCRIPTION OF THE TABLES

[0070] Table 1 presents the resistance/sensitivity phenotype classification of the 16 prostate cell lines for the protein tyrosine kinase inhibitor compound BMS-A based on IC₅₀ results. The IC₅₀ for each cell line was assessed in by MTS assays as described in Example 1 (Methods). The mean IC₅₀ values along with standard deviations (SD) were calculated from 2 to 5 individual determinations for each cell line as shown. The IC₅₀ unit is μM. The mean IC₅₀ for each cell line was log-transformed to log₁₀(IC₅₀) and the mean log₁₀(IC₅₀) across the 16 breast cell lines for BMS-A was calculated and used to normalize the IC₅₀ data for each cell line. The cell lines with an IC₅₀ lower than 0.2 μm were defined as sensitive to the compound, while those having an IC₅₀ above 0.2 μm were considered to be resistant. The cell lines presented in bold were used in the drug induction study as described herein.

TABLE 1

| | | mean IC₅₀ (μM) | | |
|---|---|---|---|---|
| No. | Cell Lines | to BMS-A | SD | Classification |
| 1 | PC3 | 0.051 | 0.007 | Sensitive |
| 2 | DU145 | 0.057 | 0.03 | Sensitive |
| 3 | HPV10 | 0.058 | 0.022 | Sensitive |
| 4 | LNCaP | 0.068 | 0.013 | Sensitive |
| 5 | RWPE1 | 0.12 | 0.085 | Sensitive |
| 6 | HPV7 | 0.127 | 0.015 | Sensitive |
| 7 | NB26 | 0.139 | 0.023 | Sensitive |
| 8 | PWR1E | 0.145 | 0.083 | Sensitive |
| 9 | RWPE2 | 0.151 | 0.027 | Sensitive |
| 10 | NB11 | 0.163 | 0.077 | Sensitive |
| 11 | W99 | 0.199 | 0.068 | Sensitive |
| 12 | 22Rvl | 2 | | Resistant |
| 13 | VCaP | 2 | | Resistant |
| 14 | MDAPCa2b | 2.5 | | Resistant |
| 15 | DUCaP | 2.5 | | Resistant |
| 16 | WPMY1 | 2.5 | | Resistant |

[0071] Table 2 shows a polynucleotide list derived from three analysis algorithms that demonstrated a high correlation between expression pattern and resistance/sensitivity classification to BMS-A. For each gene, the DNA and encoded amino acid sequence represented by SEQ ID NOs. in Table 2 are set forth in the Sequence Listing. Genes are listed according to fold change.

TABLE 2
Markers highly correlated to BMS-A in expression pattern and resistance/sensitivity classification

| | | Modulated | | | | |
|---|---|---|---|---|---|---|
| | | by BMS-A | | | | p-value |
| Gene No. | Expressed In | (p < 0.05) | Unigene Title | Gene Symbol | Probe ID | (1-way ANOVA) |
| 1 | Sensitive | | serpin peptidase inhibitor, | SERPINB5 | 204855_at | 1.75E−05 |
| | | | clade B, member 5 | | | |
| 2 | Sensitive | | keratin 6 | KRT6 | 209125_at | 3.47E−03 |
| 3 | Sensitive | decreased | sciellin | SCEL | 206884_s_at | 4.11E−04 |
| 4 | Sensitive | | prostaglandin- | PTGS2 | 204748_at | 1.10E−02 |
| | | | endoperoxide synthase 2 | | | |
| 5 | Sensitive | | S100 calcium binding | S100A2 | 204268_at | 3.15E−04 |
| | | | protein A2 | | | |
| 6 | Sensitive | | keratin 7 | KRT7 | 209016_s_at | 8.48E−05 |
| 7 | Sensitive | | interleukin 18 | IL18 | 206295_at | 2.37E−04 |
| 8 | Sensitive | decreased | annexin A3 | ANXA3 | 209369_at | 4.59E−04 |
| 9 | Sensitive | | peptidase inhibitor 3, | PI3 | 41469_at | 1.69E−02 |
| | | | skin-derived | | | |
| 10 | Sensitive | | G protein-coupled | GPR87 | 219936_s_at | 7.86E−04 |
| | | | receptor 87 | | | |
| 11 | Sensitive | | keratin 5 | KRT5 (CK5) | 201820_at | 5.67E−03 |
| 12 | Sensitive | | amphiregulin | AREG | 205239_at | 5.32E−05 |
| 13 | Sensitive | | serpin peptidase inhibitor, | SERPINB2 | 204614_at | 2.44E−02 |
| | | | clade B, member 2 | | | |
| 14 | Sensitive | | thrombomodulin | THBD | 203887_s_at | 5.59E−03 |
| 15 | Sensitive | decreased | cystatin E/M | CST6 | 206595_at | 5.86E−04 |
| 16 | Sensitive | | dystonin | DST | 204455_at | 4.25E−03 |
| 17 | Sensitive | | caveolin 2 | CAV2 | 203323_at | 1.12E−03 |
| 18 | Sensitive | | lipocalin 2 | LCN2 | 212531_at | 3.21E−03 |
| 19 | Sensitive | | chloride intracellular | CLIC3 | 219529_at | 1.45E−03 |
| | | | channel 3 | | | |
| 20 | Sensitive | | transforming growth | TGFB2 | 209909_s_at | 6.38E−04 |
| | | | factor, beta 2 | | | |
| 21 | Sensitive | | annexin A8 | ANXA8 | 203074_at | 3.50E−03 |
| 22 | Sensitive | | interferon-induced protein | IFIT1 | 203153_at | 1.33E−03 |
| | | | with tetratricopeptide | | | |
| | | | repeats 1 | | | |
| 23 | Sensitive | | parathyroid hormone-like | PTHLH | 211756_at | 2.60E−02 |
| | | | hormone | | | |
| 24 | Sensitive | | B cell RAG associated | GALNAC4S- | 203066_at | 5.57E−05 |
| | | | protein | 6ST | | |
| 25 | Sensitive | | claudin 1 | CLDN1 | 218182_s_at | 1.54E−03 |
| 26 | Sensitive | | interferon, alpha-inducible | IFI27 | 202411_at | 5.44E−03 |
| | | | protein 27 | | | |
| 27 | Sensitive | | fibroblast growth factor | FGFBP1 | 205014_at | 5.26E−03 |
| | | | binding protein 1 | | | |
| 28 | Sensitive | | S100 calcium binding | S100A9 | 203535_at | 2.55E−02 |
| | | | protein A9 | | | |
| 29 | Sensitive | | interferon-induced protein | IFI44L | 204439_at | 1.33E−02 |
| | | | 44-like | | | |
| 30 | Sensitive | | cytochrome P450, family | CYP24A1 | 206504_at | 1.01E−02 |
| | | | 24, subfamily A, | | | |
| | | | polypeptide 1 | | | |
| 31 | Sensitive | | EGF-containing fibulin- | EFEMP1 | 201842_s_at | 5.26E−03 |
| | | | like extracellular matrix | | | |
| | | | protein 1 | | | |
| 32 | Sensitive | | interferon induced | IFITM1 | 214022_s_at | 4.05E−04 |
| | | | transmembrane protein 1 | | | |
| 33 | Sensitive | decreased | laminin, gamma 2 | LAMC2 | 202267_at | 9.70E−04 |
| 34 | Sensitive | decreased | zinc finger, BED-type | ZBED2 | 219836_at | 2.04E−03 |
| | | | containing 2 | | | |
| 35 | Sensitive | | cytidine deaminase | CDA | 205627_at | 2.82E−04 |
| 36 | Sensitive | | carbonic anhydrase II | CA2 | 209301_at | 4.60E−03 |
| 37 | Sensitive | | interferon-induced | IFI44 | 214453_s_at | 1.14E−03 |
| | | | protein 44 | | | |
| 38 | Sensitive | | interferon, gamma- | IFI16 | 206332_s_at | 1.19E−02 |
| | | | inducible protein 16 | | | |
| 39 | Sensitive | | myxovirus resistance 1 | MX1 | 202086_at | 2.04E−03 |
| 40 | Sensitive | | snail homolog 2 | SNAI2 | 213139_at | 9.26E−04 |
| 41 | Sensitive | | caveolin 1 | CAV1 | 203065_s_at | 2.29E−03 |
| 42 | Sensitive | | chemokine (C-X-C motif) | CXCL2 | 209774_x_at | 1.52E−02 |
| | | | ligand 2 | | | |
| 43 | Sensitive | decreased | epiregulin | EREG | 205767_at | 3.84E−03 |
| 44 | Sensitive | | interleukin 1 receptor | IL1RN | 212657_s_at | 1.22E−02 |
| | | | antagonist | | | |
| 45 | Sensitive | | sterile alpha motif domain | SAMD9 | 219691_at | 9.35E−03 |
| | | | containing 9 | | | |
| 46 | Sensitive | | moesin | MSN | 200600_at | 4.02E−04 |
| 47 | Sensitive | | neutrophil cytosolic factor 2 | NCF2 | 209949_at | 5.09E−03 |
| 48 | Sensitive | | lysosomal-associated | LAMP3 | 205569_at | 3.17E−03 |
| | | | membrane protein 3 | | | |
| 49 | Sensitive | | lectin, galactoside- | LGALS3 | 208949_s_at | 4.65E−03 |
| | | | binding, soluble, 3 | | | |
| 50 | Sensitive | | S100 calcium binding | S100A14 | 218677_at | 2.04E−03 |
| | | | protein A14 | | | |
| 51 | Sensitive | | serpin peptidase inhibitor, | SERPINB7 | 206421_s_at | 8.26E−03 |
| | | | clade B, member 7 | | | |
| 52 | Sensitive | decreased | AXL receptor tyrosine | AXL | 202686_s_at | 7.82E−03 |
| | | | kinase | | | |
| 53 | Sensitive | | kallikrein 5 | KLK5 | 222242_s_at | 7.36E−03 |
| 54 | Sensitive | decreased | four and a half LIM | FHL2 | 202949_s_at | 6.41E−03 |
| | | | domains 2 | | | |
| 55 | Sensitive | | fascin homolog 1 | FSCN1 | 210933_s_at | 1.28E−03 |
| 56 | Sensitive | | homeo box A1 | HOXA1 | 214639_s_at | 4.05E−04 |
| 57 | Sensitive | | 2′,5′-oligoadenylate | OAS1 | 202869_at | 9.56E−03 |
| | | | synthetase 1 | | | |
| 58 | Sensitive | | dickkopf homolog 1 | DKK1 | 204602_at | 8.60E−03 |
| 59 | Sensitive | | tissue factor pathway | TFPI2 | 209278_s_at | 1.77E−02 |
| | | | inhibitor 2 | | | |
| 60 | Sensitive | | inhibin, beta A | INHBA | 210511_s_at | 1.04E−02 |
| 61 | Sensitive | | embryonal Fyn-associated | EFS | 204400_at | 1.47E−02 |
| | | | substrate | | | |
| 62 | Sensitive | | immediate early response 3 | IER3 | 201631_s_at | 2.45E−03 |
| 63 | Sensitive | decreased | plasminogen activator, | PLAU (also | 205479_s_at | 5.66E−04 |
| | | | urokinase | referred to as | | |
| | | | | uPA) | | |
| 64 | Sensitive | | met proto-oncogene | MET | 213816_s_at | 1.54E−03 |
| 65 | Sensitive | | laminin, beta 3 | LAMB3 | 209270_at | 4.23E−05 |
| 66 | Sensitive | | complement component 3 | C3 | 217767_at | 1.94E−03 |
| 67 | Sensitive | | bone marrow stromal cell | BST2 | 201641_at | 9.99E−03 |
| | | | antigen 2 | | | |
| 68 | Sensitive | | transforming growth | TGFA | 205016_at | 5.51E−03 |
| | | | factor, alpha | | | |
| 69 | Sensitive | | transforming growth | TGFB1I1 | 209651_at | 1.01E−02 |
| | | | factor beta 1 induced | | | |
| | | | transcript 1 | | | |
| 70 | Sensitive | | supervillin | SVIL | 202565_s_at | 5.86E−04 |
| 71 | Sensitive | | fer-1-like 3, myoferlin | FER1L3 | 211864_s_at | 5.16E−03 |
| 72 | Sensitive | | aldo-keto reductase family | AKR1B10 | 206561_s_at | 1.65E−02 |
| | | | 1, member B10 | | | |
| 73 | Sensitive | | RAB38, member RAS | RAB38 | 219412_at | 4.70E−03 |
| | | | oncogene family | | | |
| 74 | Sensitive | | guanine nucleotide | GNA15 | 205349_at | 2.34E−03 |
| | | | binding protein | | | |
| 75 | Sensitive | | transforming growth | TGFBR2 | 208944_at | 2.13E−03 |
| | | | factor, beta receptor II | | | |
| 76 | Sensitive | | peptidylglycine alpha- | PAM | 214620_x_at | 3.97E−03 |
| | | | amidating monooxygenase | | | |
| 77 | Sensitive | | cathepsin L2 | CTSL2 | 210074_at | 3.17E−05 |
| 78 | Sensitive | | PDZ domain containing 3 | PDZK3 | 209493_at | 3.19E−03 |
| 79 | Sensitive | | integrin, beta 4 | ITGB4 | 204989_s_at | 1.76E−04 |
| 80 | Sensitive | | pleckstrin homology-like | PHLDA1 | 217996_at | 9.17E−03 |
| | | | domain, family A, | | | |
| | | | member 1 | | | |
| 81 | Sensitive | | interferon, alpha-inducible | G1P3 | 204415_at | 5.98E−04 |
| | | | protein | | | |
| 82 | Sensitive | | fibroblast growth factor | FGFR2 | 203638_s_at | 7.62E−03 |
| | | | receptor 2 | | | |
| 83 | Sensitive | | periplakin | PPL | 203407_at | 2.49E−04 |
| 84 | Sensitive | | heparanase | HPSE | 219403_s_at | 5.48E−04 |
| 85 | Sensitive | | N-myc (and STAT) | NMI | 203964_at | 3.12E−03 |
| | | | interactor | | | |
| 86 | Sensitive | | phospholipid scramblase 1 | PLSCR1 | 202430_s_at | 8.22E−03 |
| 87 | Sensitive | | proteoglycan 1, secretory | PRG1 | 201858_s_at | 4.77E−02 |
| | | | granule | | | |
| 88 | Sensitive | | trophoblast glycoprotein | TPBG | 203476_at | 9.40E−03 |
| 89 | Sensitive | | DEAD (Asp-Glu-Ala- | DDX58 | 218943_s_at | 1.32E−03 |
| | | | Asp) box polypeptide 58 | | | |
| 90 | Sensitive | | 5′-nucleotidase, ecto | NT5E | 203939_at | 3.82E−03 |
| | | | (CD73) | | | |
| 91 | Sensitive | | suppressor of cytokine | SOCS2 | 203372_s_at | 7.70E−05 |
| | | | signaling 2 | | | |
| 92 | Sensitive | | regulator of G-protein | RGS20 | 210138_at | 1.81E−03 |
| | | | signalling 20 | | | |
| 93 | Sensitive | | cathepsin C | CTSC | 201487_at | 6.81E−03 |
| 94 | Sensitive | | v-myb myeloblastosis | MYBL1 | 213906_at | 7.99E−03 |
| | | | viral oncogene homolog | | | |
| | | | (avian)-like 1 | | | |
| 95 | Sensitive | | interleukin 1, beta | IL1B | 39402_at | 2.77E−02 |
| 96 | Sensitive | | insulin-like growth factor | IGFBP6 | 203851_at | 1.34E−02 |
| | | | binding protein 6 | | | |
| 97 | Sensitive | | gap junction protein, beta | GJB5 | 206156_at | 3.68E−03 |
| | | | 5 (connexin 31.1) | | | |
| 98 | Sensitive | | keratin, hair, basic, 1 | KRTHB1 | 213711_at | 6.73E−03 |
| 99 | Sensitive | | FYVE, RhoGEF and PH | FGD6 | 219901_at | 3.06E−04 |
| | | | domain containing 6 | | | |
| 100 | Sensitive | decreased | aryl hydrocarbon receptor | ARNTL2 | 220658_s_at | 4.15E−03 |
| | | | nuclear translocator-like 2 | | | |
| 101 | Sensitive | | 2′-5′-oligoadenylate | OAS2 | 204972_at | 3.75E−02 |
| | | | synthetase 2, 69/71 kDa | | | |
| 102 | Sensitive | | SH3 domain binding glutamic | SH3BGRL | 201312_s_at | 8.44E−03 |
| | | | acid-rich protein like | | | |
| 103 | Sensitive | | opsin 3 (encephalopsin, | OPN3 | 219032_x_at | 4.03E−03 |
| | | | panopsin) | | | |
| 104 | Sensitive | | vesicle-associated | VAMP8 | 202546_at | 1.09E−03 |
| | | | membrane protein 8 | | | |
| 105 | Sensitive | | annexin A1 | ANXA1 | 201012_at | 7.84E−03 |
| 106 | Sensitive | | deafness, autosomal | DFNA5 | 203695_s_at | 7.57E−04 |
| | | | dominant 5 | | | |
| 107 | Sensitive | | secretory leukocyte | SLPI | 203021_at | 4.01E−03 |
| | | | peptidase inhibitor | | | |
| 108 | Sensitive | | serpin peptidase inhibitor, | SERPINA1 | 202833_s_at | 4.93E−02 |
| | | | clade A, member 1 | | | |
| 109 | Sensitive | | zinc finger protein 185 | ZNF185 | 203585_at | 2.33E−04 |
| | | | (LIM domain) | | | |
| 110 | Sensitive | | Rho family GTPase 3 | RND3 | 212724_at | 1.07E−02 |
| 111 | Sensitive | | IGF-II mRNA-binding | IMP-3 | 203820_s_at | 7.38E−03 |
| | | | protein 3 | | | |
| 112 | Sensitive | | epithelial membrane | EMP1 | 201325_s_at | 1.14E−02 |
| | | | protein 1 | | | |
| 113 | Sensitive | | tumor-associated calcium | TACSTD2 | 202286_s_at | 4.98E−03 |
| | | | signal transducer 2 | | | |
| 114 | Sensitive | | ADAM metallopeptidase | ADAM19 | 209765_at | 9.42E−03 |
| | | | domain 19 | | | |
| 115 | Sensitive | | lectin, galactoside- | LGALS3BP | 200923_at | 5.54E−04 |
| | | | binding, soluble, 3 binding | | | |
| | | | protein | | | |
| 116 | Sensitive | | cadherin 3, type 1, | CDH3 | 203256_at | 1.46E−03 |
| | | | P-cadherin | | | |
| 117 | Sensitive | | keratin 15 | KRT15 | 204734_at | 4.20E−03 |
| 118 | Sensitive | | ATP-binding cassette, | ABCA12 | 215465_at | 1.52E−02 |
| | | | sub-family A (ABC1), | | | |
| | | | member 12 | | | |
| 119 | Sensitive | | tumor necrosis factor, | TNFAIP3 | 202644_s_at | 2.71E−03 |
| | | | alpha-induced protein 3 | | | |
| 120 | Sensitive | | vascular endothelial | VEGFC | 209946_at | 6.89E−03 |
| | | | growth factor C | | | |
| 121 | Sensitive | | interferon-stimulated | ISGF3G | 203882_at | 3.43E−04 |
| | | | transcription factor 3, | | | |
| | | | gamma | | | |
| 122 | Sensitive | | squamous cell carcinoma | SART2 | 218854_at | 6.21E−03 |
| | | | antigen recognized by T | | | |
| | | | cells 2 | | | |
| 123 | Sensitive | | potassium channel | KCTD12 | 212192_at | 1.69E−02 |
| | | | tetramerisation domain | | | |
| | | | containing 12 | | | |
| 124 | Sensitive | | chemokine (C-X-C motif) | CXCL1 | 204470_at | 3.53E−02 |
| | | | ligand 1 | | | |
| 125 | Resistant | | tetraspanin 8 | TSPAN8 | 203824_at | 2.73E−05 |
| 126 | Resistant | | trinucleotide repeat | TNRC9 | 214774_x_at | 7.44E−05 |
| | | | containing 9 | | | |
| 127 | Resistant | | kallikrein 2, prostatic | KLK2 | 209854_s_at | 1.86E−03 |
| 128 | Resistant | | T cell receptor gamma | TRGC2 | 211144_x_at | 1.91E−03 |
| | | | constant 2 | | | |
| 129 | Resistant | | albumin | ALB | 211298_s_at | 3.38E−03 |
| 130 | Resistant | | cysteine-rich secretory | CRISP3 | 207802_at | 1.58E−02 |
| | | | protein 3 | | | |
| 131 | Resistant | | Rho GTPase activating | ARHGAP6 | 206167_s_at | 9.90E−04 |
| | | | protein 6 | | | |
| 132 | Resistant | | lymphoid enhancer- | LEF1 | 221558_s_at | 4.71E−06 |
| | | | binding factor 1 | | | |
| 133 | Resistant | | collectin sub-family | COLEC12 | 221019_s_at | 1.06E−05 |
| | | | member 12 | | | |
| 134 | Resistant | | folate hydrolase (prostate- | FOLH1 | 215363_x_at | 1.29E−02 |
| | | | specific membrane | | | |
| | | | antigen) 1 | | | |
| 135 | Resistant | | neuropeptide Y | NPY | 206001_at | 1.93E−02 |
| 136 | Resistant | | cytochrome P450, family | CYP4F8 | 210576_at | 2.80E−03 |
| | | | 4, subfamily F, | | | |
| | | | polypeptide 8 | | | |
| 137 | Resistant | | androgen receptor | AR | 211621_at | 1.31E−03 |
| 138 | Resistant | | fibroblast growth factor 13 | FGF13 | 205110_s_at | 3.08E−03 |
| 139 | Resistant | | hepatocyte growth factor | HGF | 210755_at | 2.24E−04 |
| 140 | Resistant | | phospholipase A2, group VII | PLA2G7 | 206214_at | 6.02E−04 |
| 141 | Resistant | | kallikrein 3 (prostate | KLK3 (PSA) | 204583_x_at | 1.33E−02 |
| | | | specific antigen) | | | |
| 142 | Resistant | | protein kinase, cAMP- | PRKAR2B | 203680_at | 3.56E−04 |
| | | | dependent, regulatory, | | | |
| | | | type II, beta | | | |
| 143 | Resistant | | acid phosphatase, prostate | ACPP | 204393_s_at | 6.94E−03 |
| 144 | Resistant | | signal peptide, CUB | SCUBE2 | 219197_s_at | 1.86E−03 |
| | | | domain, EGF-like 2 | | | |
| 145 | Resistant | | phospholipase A1 | PLA1A | 219584_at | 2.71E−02 |
| | | | member A | | | |
| 146 | Resistant | | integral membrane | ITM2A | 202747_s_at | 1.88E−02 |
| | | | protein 2A | | | |
| 147 | Resistant | | secretogranin III | SCG3 | 219196_at | 2.24E−03 |
| 148 | Resistant | | phospholipase A2, group IVC | PLA2G4C | 209785_s_at | 3.30E−03 |
| 149 | Resistant | | v-ets erythroblastosis virus | ERG | 213541_s_at | 2.09E−02 |
| | | | E26 oncogene like | | | |
| 150 | Resistant | | tudor domain containing 1 | TDRD1 | 221018_s_at | 2.31E−03 |
| 151 | Resistant | | acyl-CoA synthetase medium- | ACSM3 | 205942_s_at | 3.62E−03 |
| | | | chain family member 3 | | | |
| 152 | Resistant | | aldehyde dehydrogenase 1 | ALDH1A1 | 212224_at | 8.50E−03 |
| | | | family, member A1 | | | |
| 153 | Resistant | | protein phosphatase 1E | PPM1E | 205938_at | 2.86E−04 |
| 154 | Resistant | | Ras-related GTP binding D | RRAGD | 221523_s_at | 1.43E−03 |
| 155 | Resistant | | regulator of G-protein | RGS4 | 204337_at | 1.01E−02 |
| | | | signalling 4 | | | |
| 156 | Resistant | | neurofilament, heavy | NEFH | 33767_at | 7.68E−04 |
| | | | polypeptide | | | |
| 157 | Resistant | | sucrase-isomaltase | SI | 206664_at | 1.58E−02 |
| 158 | Resistant | | UDP | UGT2B4 | 206505_at | 5.51E−03 |
| | | | glucuronosyltransferase 2 | | | |
| | | | family, polypeptide B4 | | | |
| 159 | Resistant | | myosin VIIA and Rab | MYRIP | 214156_at | 7.82E−03 |
| | | | interacting protein | | | |
| 160 | Resistant | | leucine-rich, glioma | LGI1 | 206349_at | 2.42E−02 |
| | | | inactivated 1 | | | |
| 161 | Resistant | | Phosphodiesterase 3B, | PDE3B | 222317_at | 2.79E−03 |
| | | | cGMP-inhibited | | | |
| 162 | Resistant | | elongation of very long | ELOVL2 | 213712_at | 3.11E−04 |
| | | | chain fatty acids-like 2 | | | |
| 163 | Resistant | | gamma-aminobutyric acid | GABRB3 | 205850_s_at | 2.80E−03 |
| | | | (GABA) A receptor, beta 3 | | | |
| 164 | Resistant | | adrenergic, alpha-2A-, | ADRA2A | 209869_at | 9.22E−03 |
| | | | receptor | | | |
| 165 | Resistant | | zinc finger and BTB | ZBTB10 | 219312_s_at | 5.94E−03 |
| | | | domain containing 10 | | | |
| 166 | Resistant | | myosin binding protein C, | MYBPC1 | 214087_s_at | 6.78E−04 |
| | | | slow type | | | |
| 167 | Resistant | | angiotensin II receptor, | AGTR1 | 205357_s_at | 3.01E−03 |
| | | | type 1 | | | |
| 168 | Resistant | | homogentisate 1,2- | HGD | 205221_at | 1.55E−03 |
| | | | dioxygenase | | | |
| 169 | Resistant | | reticulon 1 | RTN1 | 203485_at | 2.51E−02 |
| 170 | Resistant | | kinesin family member 5C | KIF5C | 203130_s_at | 5.35E−03 |
| 171 | Resistant | | ADAM metallopeptidase | ADAMTS3 | 214913_at | 1.31E−03 |
| | | | with thrombospondin type | | | |
| | | | 1 motif, 3 | | | |
| 172 | Resistant | | coagulation factor V | F5 | 204714_s_at | 1.46E−02 |
| | | | (proaccelerin, labile | | | |
| | | | factor) | | | |
| 173 | Resistant | | solute carrier family 16 | SLC16A10 | 219915_s_at | 1.63E−03 |
| | | | (monocarboxylic acid | | | |
| | | | transporters), member 10 | | | |
| 174 | Resistant | | secretoglobin, family 2A, | SCGB2A1 | 205979_at | 2.84E−03 |
| | | | member 1 | | | |

| | p-value | | | | | |
|---|---|---|---|---|---|---|
| | (IC50 | Fold | DNA | GENBANK ® | Amino Acid | GENBANK ® |
| Gene No. | correlation) | Change* | SEQ ID NO: | Accession No. | SEQ ID NO: | Accession No. |
| 1 | 5.24E−04 | 6.91 | 11 | NM_002639 | 12 | NP_002630.1 |
| 2 | 3.01E−02 | 6.46 | 13 | NM_005554 | 14 | NP_005545.1 |
| 3 | 4.33E−03 | 5.8 | 15 | NM_003843 | 16 | NP_003834.2 |
| 4 | 4.22E−02 | 5.3 | 17 | NM_000963 | 18 | NP_000954.1 |
| 5 | 4.90E−03 | 5.2 | 19 | NM_005978 | 20 | NP_005969.1 |
| 6 | 1.38E−03 | 5.02 | 21 | NM_005556 | 22 | NP_005547.3 |
| 7 | 4.76E−03 | 4.6 | 23 | NM_001562 | 24 | NP_001553.1 |
| 8 | 4.18E−03 | 4.46 | 25 | NM_005139 | 26 | NP_005130.1 |
| 9 | 2.74E−02 | 4.44 | 27 | NM_002638 | 28 | NP_002629.1 |
| 10 | 9.78E−03 | 4.42 | 29 | NM_023915 | 30 | NP_076404.2 |
| 11 | 4.91E−02 | 4.41 | 1 | NM_000424 | 2 | NP_000415.1 |
| 12 | 4.62E−04 | 4.38 | 31 | NM_001657 | 32 | NP_001648.1 |
| 13 | 4.85E−02 | 4.36 | 33 | NM_002575 | 34 | NP_002566.1 |
| 14 | 3.21E−02 | 4.23 | 35 | NM_000361 | 36 | NP_000352.1 |
| 15 | 8.19E−03 | 4.21 | 37 | NM_001323 | 38 | NP_001314.1 |
| 16 | 3.09E−02 | 4.19 | 39 | NM_001723 | 40 | NP_001714.1 |
| 17 | 4.32E−03 | 4.09 | 41 | NM_001233 | 42 | NP_001224.1 |
| 18 | 7.33E−03 | 4.03 | 43 | NM_005564 | 44 | NP_005555.2 |
| 19 | 1.15E−02 | 3.96 | 45 | NM_004669 | 46 | NP_004660.2 |
| 20 | 8.25E−03 | 3.94 | 47 | NM_003238 | 48 | NP_003229.1 |
| 21 | 4.12E−02 | 3.93 | 49 | NM_001040084 | 50 | NP_001035173.1 |
| 22 | 2.56E−03 | 3.92 | 51 | NM_001001887 | 52 | NP_001001887.1 |
| 23 | 2.88E−02 | 3.91 | 53 | NM_002820 | 54 | NP_002811.1 |
| 24 | 3.89E−04 | 3.91 | 55 | NM_015892 | 56 | NP_056976.2 |
| 25 | 1.86E−02 | 3.91 | 57 | NM_021101 | 58 | NP_066924.1 |
| 26 | 1.76E−02 | 3.89 | 59 | NM_005532 | 60 | NP_005523.3 |
| 27 | 1.58E−02 | 3.86 | 61 | NM_005130 | 62 | NP_005121.1 |
| 28 | 4.12E−02 | 3.83 | 63 | NM_002965 | 64 | NP_002956.1 |
| 29 | 2.40E−02 | 3.82 | 65 | NM_006820 | 66 | NP_006811.1 |
| 30 | 2.52E−02 | 3.82 | 67 | NM_000782 | 68 | NP_000773.2 |
| 31 | 2.92E−02 | 3.81 | 69 | NM_001039348 | 70 | NP_001034437.1 |
| 32 | 4.14E−03 | 3.73 | 71 | NM_003641 | 72 | NP_003632.2 |
| 33 | 8.46E−03 | 3.71 | 73 | NM_005562 | 74 | NP_005553.1 |
| 34 | 2.13E−02 | 3.7 | 75 | NM_024508 | 76 | NP_078784.2 |
| 35 | 1.75E−03 | 3.69 | 77 | NM_001785 | 78 | NP_001776.1 |
| 36 | 2.56E−02 | 3.68 | 79 | NM_000067 | 80 | NP_000058.1 |
| 37 | 3.42E−03 | 3.67 | 81 | NM_006417 | 82 | NP_006408.2 |
| 38 | 3.35E−02 | 3.63 | 83 | NM_005531 | 84 | NP_005522.2 |
| 39 | 4.92E−03 | 3.62 | 85 | NM_002462 | 86 | NP_002453.1 |
| 40 | 6.16E−03 | 3.62 | 87 | NM_003068 | 88 | NP_003059.1 |
| 41 | 8.77E−03 | 3.61 | 89 | NM_001753 | 90 | NP_001744.2 |
| 42 | 2.03E−02 | 3.55 | 91 | NM_002089 | 92 | NP_002080.1 |
| 43 | 1.01E−02 | 3.54 | 93 | NM_001432 | 94 | NP_001423.1 |
| 44 | 3.01E−02 | 3.54 | 95 | NM_000577 | 96 | NP_000568.1 |
| 45 | 4.13E−02 | 3.51 | 97 | NM_017654 | 98 | NP_060124.2 |
| 46 | 1.04E−03 | 3.48 | 99 | NM_002444 | 100 | NP_002435.1 |
| 47 | 1.94E−02 | 3.45 | 101 | NM_000433 | 102 | NP_000424.2 |
| 48 | 6.38E−03 | 3.44 | 103 | NM_014398 | 104 | NP_055213.2 |
| 49 | 1.85E−02 | 3.4 | 105 | NM_002306 | 106 | NP_002297.1 |
| 50 | 1.72E−02 | 3.39 | 107 | NM_020672 | 108 | NP_065723.1 |
| 51 | 1.69E−02 | 3.38 | 109 | NM_001040147 | 110 | NP_001035237.1 |
| 52 | 2.10E−02 | 3.36 | 111 | NM_001699 | 112 | NP_001690.2 |
| 53 | 2.71E−02 | 3.35 | 113 | NM_012427 | 114 | NP_036559.1 |
| 54 | 3.23E−02 | 3.31 | 115 | NM_001039492 | 116 | NP_001034581.1 |
| 55 | 5.84E−03 | 3.31 | 117 | NM_003088 | 118 | NP_003079.1 |
| 56 | 3.61E−03 | 3.31 | 119 | NM_005522 | 120 | NP_005513.1 |
| 57 | 1.77E−02 | 3.31 | 121 | NM_001032409 | 122 | NP_001027581.1 |
| 58 | 2.22E−02 | 3.31 | 123 | NM_012242 | 124 | NP_036374.1 |
| 59 | 2.41E−02 | 3.29 | 125 | NM_006528 | 126 | NP_006519.1 |
| 60 | 3.94E−02 | 3.29 | 127 | NM_002192 | 128 | NP_002183.1 |
| 61 | 3.00E−02 | 3.28 | 129 | NM_005864 | 130 | NP_005855.1 |
| 62 | 9.30E−03 | 3.28 | 131 | NM_003897 | 132 | NP_003888.1 |
| 63 | 8.12E−04 | 3.27 | 3 | NM_002658 | 4 | NP_002649.1 |
| 64 | 8.71E−03 | 3.26 | 133 | NM_000245 | 134 | NP_000236.2 |
| 65 | 5.06E−04 | 3.26 | 135 | NM_000228 | 136 | NP_000219.2 |
| 66 | 1.93E−02 | 3.25 | 137 | NM_000064 | 138 | NP_000055.1 |
| 67 | 4.78E−02 | 3.25 | 139 | NM_004335 | 140 | NP_004326.1 |
| 68 | 2.83E−02 | 3.25 | 141 | NM_003236 | 142 | NP_003227.1 |
| 69 | 4.60E−02 | 3.24 | 143 | NM_001042454 | 144 | NP_001035919.1 |
| 70 | 7.34E−03 | 3.23 | 145 | NM_003174 | 146 | NP_003165.1 |
| 71 | 1.65E−02 | 3.23 | 147 | NM_013451 | 148 | NP_038479.1 |
| 72 | 1.56E−02 | 3.21 | 149 | NM_020299 | 150 | NP_064695.2 |
| 73 | 2.54E−02 | 3.2 | 151 | NM_022337 | 152 | NP_071732.1 |
| 74 | 1.96E−02 | 3.2 | 153 | NM_002068 | 154 | NP_002059.1 |
| 75 | 1.35E−02 | 3.19 | 155 | NM_001024847 | 156 | NP_001020018.1 |
| 76 | 1.76E−02 | 3.17 | 157 | NM_000919 | 158 | NP_000910.2 |
| 77 | 1.39E−03 | 3.17 | 159 | NM_001333 | 160 | NP_001324.2 |
| 78 | 1.67E−02 | 3.16 | 161 | NM_178140 | 162 | NP_835260.2 |
| 79 | 3.28E−03 | 3.16 | 163 | NM_000213 | 164 | NP_000204.3 |
| 80 | 1.62E−02 | 3.15 | 165 | NM_007350 | 166 | NP_031376.3 |
| 81 | 1.95E−03 | 3.13 | 167 | NM_002038 | 168 | NP_002029.3 |
| 82 | 4.20E−02 | 3.13 | 169 | NM_000141 | 170 | NP_000132.1 |
| 83 | 4.47E−03 | 3.12 | 171 | NM_002705 | 172 | NP_002696.3 |
| 84 | 3.67E−03 | 3.12 | 173 | NM_006665 | 174 | NP_006656.2 |
| 85 | 1.20E−02 | 3.12 | 175 | NM_004688 | 176 | NP_004679.1 |
| 86 | 2.41E−02 | 3.1 | 177 | NM_021105 | 178 | NP_066928.1 |
| 87 | 4.19E−02 | 3.1 | 179 | NM_002727 | 180 | NP_002718.2 |
| 88 | 2.96E−02 | 3.09 | 181 | NM_006670 | 182 | NP_006661.1 |
| 89 | 5.71E−03 | 3.09 | 183 | NM_014314 | 184 | NP_055129.2 |
| 90 | 7.69E−03 | 3.09 | 185 | NM_002526 | 186 | NP_002517.1 |
| 91 | 1.00E−04 | 3.08 | 187 | NM_003877 | 188 | NP_003868.1 |
| 92 | 1.20E−02 | 3.08 | 189 | NM_003702 | 190 | NP_003693.2 |
| 93 | 2.15E−02 | 3.07 | 191 | NM_001814 | 192 | NP_001805.1 |
| 94 | 1.89E−02 | 3.07 | 193 | XM_034274 | 194 | XP_034274.7 |
| 95 | 3.45E−02 | 3.07 | 195 | NM_000576 | 196 | NP_000567.1 |
| 96 | 2.21E−02 | 3.07 | 197 | NM_002178 | 198 | NP_002169.1 |
| 97 | 3.61E−02 | 3.07 | 199 | NM_005268 | 200 | NP_005259.1 |
| 98 | 1.08E−02 | 3.07 | 201 | NM_002281 | 202 | NP_002272.1 |
| 99 | 1.83E−03 | 3.06 | 203 | NM_018351 | 204 | NP_060821.2 |
| 100 | 4.71E−03 | 3.06 | 205 | NM_020183 | 206 | NP_064568.3 |
| 101 | 3.95E−02 | 3.06 | 207 | NM_001032731 | 208 | NP_001027903.1 |
| 102 | 7.12E−03 | 3.06 | 209 | NM_003022 | 210 | NP_003013.1 |
| 103 | 5.85E−03 | 3.06 | 211 | NM_001030011 | 212 | NP_001025182.1 |
| 104 | 2.74E−03 | 3.06 | 213 | NM_003761 | 214 | NP_003752.2 |
| 105 | 2.98E−02 | 3.05 | 215 | NM_000700 | 216 | NP_000691.1 |
| 106 | 4.90E−03 | 3.05 | 217 | NM_004403 | 218 | NP_004394.1 |
| 107 | 1.32E−02 | 3.05 | 219 | NM_003064 | 220 | NP_003055.1 |
| 108 | 3.16E−02 | 3.04 | 221 | NM_000295 | 222 | NP_000286.3 |
| 109 | 8.85E−04 | 3.04 | 223 | NM_007150 | 224 | NP_009081.1 |
| 110 | 3.81E−02 | 3.04 | 225 | NM_005168 | 226 | NP_005159.1 |
| 111 | 2.08E−02 | 3.04 | 227 | NM_006547 | 228 | NP_006538.2 |
| 112 | 3.97E−02 | 3.03 | 229 | NM_001423 | 230 | NP_001414.1 |
| 113 | 2.63E−02 | 3.02 | 231 | NM_002353 | 232 | NP_002344.1 |
| 114 | 3.24E−02 | 3.02 | 233 | NM_023038 | 234 | NP_075525.2 |
| 115 | 5.87E−03 | 3.02 | 235 | NM_005567 | 236 | NP_005558.1 |
| 116 | 1.05E−02 | 3.02 | 237 | NM_001793 | 238 | NP_001784.2 |
| 117 | 2.37E−02 | 3.02 | 239 | NM_002275 | 240 | NP_002266.2 |
| 118 | 2.79E−02 | 3 | 241 | NM_015657 | 242 | NP_056472.2 |
| 119 | 1.35E−02 | 3 | 243 | NM_006290 | 244 | NP_006281.1 |
| 120 | 1.48E−02 | 3 | 245 | NM_005429 | 246 | NP_005420.1 |
| 121 | 2.19E−03 | 3 | 247 | NM_006084 | 248 | NP_006075.3 |
| 122 | 3.33E−02 | 2.99 | 249 | NM_013352 | 250 | NP_037484.1 |
| 123 | 4.51E−02 | 2.99 | 251 | NM_138444 | 252 | NP_612453.1 |
| 124 | 3.92E−02 | 2.99 | 253 | NM_001511 | 254 | NP_001502.1 |
| 125 | 5.27E−04 | 5.41 | 255 | NM_004616 | 256 | NP_004607.1 |
| 126 | 4.01E−04 | 5.1 | 257 | XM_049037 | 258 | XP_049037.9 |
| 127 | 5.88E−03 | 4.84 | 259 | NM_001002231 | 260 | NP_001002231.1 |
| 128 | 6.58E−03 | 4.6 | 261 | NM_001003799 | 262 | NP_001003799.1 |
| 129 | 8.64E−03 | 4.52 | 263 | NM_000477 | 264 | NP_000468.1 |
| 130 | 2.15E−02 | 4.35 | 265 | NM_006061 | 266 | NP_006052.1 |
| 131 | 6.09E−03 | 4.25 | 267 | NM_001174 | 268 | NP_001165.2 |
| 132 | 3.74E−05 | 3.93 | 269 | NM_016269 | 270 | NP_057353.1 |
| 133 | 1.61E−04 | 3.88 | 271 | NM_030781 | 272 | NP_110408.2 |
| 134 | 3.81E−02 | 3.76 | 273 | NM_001014986 | 274 | NP_001014986.1 |
| 135 | 2.60E−02 | 3.74 | 275 | NM_000905 | 276 | NP_000896.1 |
| 136 | 3.59E−03 | 3.7 | 277 | NM_007253 | 278 | NP_009184.1 |
| 137 | 4.66E−03 | 3.68 | 5 | NM_000044 | 6 | NP_000035.2 |
| 138 | 1.34E−02 | 3.61 | 279 | NM_004114 | 280 | NP_004105.1 |
| 139 | 6.10E−04 | 3.57 | 281 | NM_000601 | 282 | NP_000592.3 |
| 140 | 5.21E−03 | 3.56 | 283 | NM_005084 | 284 | NP_005075.2 |
| 141 | 2.70E−02 | 3.51 | 7 | NM_001030047 | 8 | NP_001025218.1 |
| 142 | 3.75E−03 | 3.46 | 285 | NM_002736 | 286 | NP_002727.2 |
| 143 | 1.68E−02 | 3.45 | 287 | NM_001099 | 288 | NP_001090.2 |
| 144 | 4.07E−03 | 3.43 | 289 | NM_020974 | 290 | NP_066025.1 |
| 145 | 4.47E−02 | 3.42 | 291 | NM_015900 | 292 | NP_056984.1 |
| 146 | 2.70E−02 | 3.42 | 293 | NM_004867 | 294 | NP_004858.1 |
| 147 | 4.82E−03 | 3.39 | 295 | NM_013243 | 296 | NP_037375.2 |
| 148 | 5.78E−03 | 3.37 | 297 | NM_003706 | 298 | NP_003697.1 |
| 149 | 3.31E−02 | 3.37 | 299 | NM_004449 | 300 | NP_004440.1 |
| 150 | 4.25E−03 | 3.36 | 301 | NM_198795 | 302 | NP_942090.1 |
| 151 | 1.99E−02 | 3.35 | 305 | NM_005622 | 306 | NP_005613.2 |
| 152 | 1.94E−02 | 3.26 | 307 | NM_000689 | 308 | NP_000680.2 |
| 153 | 2.14E−03 | 3.24 | 309 | NM_014906 | 310 | NP_055721.3 |
| 154 | 6.19E−03 | 3.24 | 311 | NM_021244 | 312 | NP_067067.1 |
| 155 | 2.63E−02 | 3.23 | 313 | NM_005613 | 314 | NP_005604.1 |
| 156 | 1.32E−03 | 3.22 | 315 | NM_021076 | 316 | NP_066554.2 |
| 157 | 2.51E−02 | 3.21 | 317 | NM_001041 | 318 | NP_001032.1 |
| 158 | 1.02E−02 | 3.18 | 319 | NM_021139 | 320 | NP_066962.1 |
| 159 | 2.40E−02 | 3.17 | 321 | NM_015460 | 322 | NP_056275.2 |
| 160 | 3.40E−02 | 3.15 | 323 | NM_005097 | 324 | NP_005088.1 |
| 161 | 1.34E−02 | 3.15 | 325 | NM_000922 | 326 | NP_000913.2 |
| 162 | 2.76E−03 | 3.13 | 327 | NM_017770 | 328 | NP_060240.2 |
| 163 | 1.24E−02 | 3.12 | 329 | NM_000814 | 330 | NP_000805.1 |
| 164 | 2.54E−02 | 3.11 | 331 | NM_000681 | 332 | NP_000672.2 |
| 165 | 4.05E−02 | 3.1 | 333 | NM_023929 | 334 | NP_076418.2 |
| 166 | 2.10E−03 | 3.09 | 335 | NM_002465 | 336 | NP_002456.2 |
| 167 | 5.83E−03 | 3.08 | 337 | NM_000685 | 338 | NP_000676.1 |
| 168 | 4.28E−03 | 3.08 | 339 | NM_000187 | 340 | NP_000178.1 |
| 169 | 4.68E−02 | 3.07 | 341 | NM_021136 | 342 | NP_066959.1 |
| 170 | 9.48E−03 | 3.06 | 343 | XM_377774 | 344 | XP_377774.3 |
| 171 | 5.82E−03 | 3.03 | 345 | NM_014243 | 346 | NP_055058.1 |
| 172 | 3.10E−02 | 3.02 | 347 | NM_000130 | 348 | NP_000121.2 |
| 173 | 4.08E−03 | 3.01 | 349 | NM_018593 | 350 | NP_061063.2 |
| 174 | 5.38E−03 | 2.99 | 351 | NM_002407 | 352 | NP_002398.1 |

TABLE 3
Common predictive markers identified in prostate and breast preclinical models.

| | | | | p-value | p-value | |
|---|---|---|---|---|---|---|
| | | | | (1-way | (IC50 | |
| Gene No. | Probe ID | Gene symbol | Gene description | ANOVA) | correlation) | Fold change |
| 17 | 203324_s_at | CAV2 | caveolin 2 | 1.21E−03 | 5.74E−03 | 4.63 |
| 41 | 212097_at | CAV1 | caveolin 1 | 2.74E−03 | 1.00E−02 | 4.19 |
| 63 | 211668_s_at | PLAU | plasminogen activator, | 1.02E−03 | 1.50E−03 | 3.80 |
| | | | urokinase | | | |
| 40 | 213139_at | SNAI2 | snail homolog 2 | 9.26E−04 | 6.16E−03 | 3.62 |
| 46 | 200600_at | MSN | moesin | 4.02E−04 | 1.04E−03 | 3.48 |
| 64 | 203510_at | MET | met proto-oncogene | 4.93E−03 | 1.97E−02 | 3.30 |
| 38 | 208966_x_at | IFI16 | interferon, gamma- | 1.64E−02 | 4.34E−02 | 3.27 |
| | | | inducible protein 16 | | | |
| 65 | 209270_at | LAMB3 | laminin, beta 3 | 4.23E−05 | 5.06E−04 | 3.26 |
| 75 | 208944_at | TGFBR2 | transforming growth factor, | 2.13E−03 | 1.35E−02 | 3.19 |
| | | | beta receptor II | | | |
| 105 | 201012_at | ANXA1 | annexin A1 | 7.84E−03 | 2.98E−02 | 3.05 |
| 123 | 212192_at | KCTD12 | potassium channel | 1.69E−02 | 4.51E−02 | 2.99 |
| | | | tetramerisation | | | |
| | | | domain containing 12 | | | |
| 175 | 203499_at | EPHA2 | EPH receptor A2 | 5.35E−03 | 2.02E−02 | 2.69 |
| 176 | 219926_at | POPDC3 | popeye domain | 3.25E−02 | 2.72E−02 | 2.53 |
| | | | containing 3 | | | |
| 177 | 212510_at | GPD1L | glycerol-3-phosphate | 1.21E−02 | 4.41E−02 | 0.42 |
| | | | dehydrogenase 1-like | | | |

***The SEQ ID NOs for the polynucleotide and polypeptide sequences for Gene No. 175 (EPHA2), Gene No. 176 (POPDC3), and Gene No. 177 (GPD1L) are SEQ ID NO: 9 and 10, SEQ ID NO: 353 and 354, and SEQ ID NO: 355 and 356, respectively.

[0072] Table 4 lists the predictor set of 10 polynucleotides. These 10 polynucleotides were selected from the 174 polynucleotides shown in Table 2 based upon data derived from three analysis methods and from drug treatment studies.

TABLE 4

| | | Gene | Modulated | Highly |
|---|---|---|---|---|
| Gene No. | Gene description | symbol | by BMS-A | Expressed in |
| 3 | sciellin | SCEL | Decreased | Sensitive |
| 8 | annexin A3 | ANXA3 | Decreased | Sensitive |
| 15 | cystatin E/M | CST6 | Decreased | Sensitive |
| 33 | laminin, gamma 2 | LAMC2 | Decreased | Sensitive |
| 34 | zinc finger, BED- | ZBED2 | Decreased | Sensitive |
| | type containing 2 | | | |
| 43 | epiregulin | EREG | Decreased | Sensitive |
| 52 | AXL receptor | AXL | Decreased | Sensitive |
| | tyrosine kinase | | | |
| 54 | four and a half LIM | FHL2 | Decreased | Sensitive |
| | domains 2 | | | |
| 63 | plasminogen | PLAU | Decreased | Sensitive |
| | activator, urokinase | | | |
| 100 | aryl hydrocarbon | ARNTL2 | Decreased | Sensitive |
| | receptor nuclear | | | |
| | translocator-like 2 | | | |

[0073] Table 5 lists the predictor set of 5 polynucleotides.

TABLE 5

| | | | | | GENBANK ® | | GENBANK ® | |
|---|---|---|---|---|---|---|---|---|
| | Gene | Gene | Modulated | Highly | Accession | | Accession | |
| Gene No. | description | symbol | by BMS-A | Expressed in | DNA | SEQ ID NO: | Protein | SEQ ID NO |
| 11 | keratin 5 | KRT5 | | Sensitive | NM_000424 | 1 | NP_000415 | 2 |
| | | (CK5) | | | | | | |
| 142 | kallikrein 3 | KLK3 | | Resistant | NM_001030047 | 7 | NP_001025218 | 8 |
| | (prostate | (PSA) | | | | | | |
| | specific | | | | | | | |
| | antigen) | | | | | | | |
| 137 | androgen | AR | | Sensitive | NM_000044 | 5 | NP_000035 | 6 |
| | receptor | | | | | | | |
| 63 | plasminogen | PLAU | Decreased | Sensitive | NM_002658 | 3 | NP_002649 | 4 |
| | activator, | | | | | | | |
| | urokinase | | | | | | | |
| 175 | EPH receptor A2 | EPHA2 | Decreased | Sensitive | NM_004431 | 9 | NP_004422 | 10 |

[0074] Table 6 lists the representative RT-PCR primer sets for each of the protein tyrosine kinase biomarker polynucleotides of the present invention. The SEQ ID NO: for each RT-PCR primer is provided (SEQ ID NO: 357 thru 887).

TABLE 6

| GENBANK ® | Primer/probe | | SEQ ID |
|---|---|---|---|
| Accession No. | type | Sequence | NO: |
| NM_002639 | Forward | CCAAGGGAGTGGCCCTATCAAAT | 357 |
| | Probe | CCATAGAGGTGCCAGGAGCACGGATCCT | 358 |
| | Reverse | GGATGGTCAGCATTCAATTCATCCT | 359 |
| NM_005554 | Forward | CGCAAGCTGCTGGAGGGTG | 360 |
| | Probe | GGAGTGCAGGCTGAATGGCGAAGGC | 361 |
| | Reverse | CTGGAGACGGTGGACTGCACC | 362 |
| NM_003843 | Forward | TCCCATTTCTTTCAGCCAGATCCT | 363 |
| | Probe | CCCAGGGAATCACTACAGGCTGGTTAGCCA | 364 |
| | Reverse | AAGGTAACATTGGACATGCTGCCTT | 365 |
| NM_000963 | Forward | ACCATGGTAGAAGTTGGAGCACCAT | 366 |
| | Probe | TGTTCTCCTGCCTACTGGAAGCCAAGCACT | 367 |
| | Reverse | ATTTGAAAACCCACTTCTCCACCAA | 368 |
| NM_005978 | Forward | CATGATGTGCAGTTCTCTGGAGCA | 369 |
| | Probe | GCTGGCTGTGCTGGTCACTACCTTCCACA | 370 |
| | Reverse | TCGCCCTCTTGGCAGGAGTACT | 371 |
| NM_005556 | Forward | CAGCTGCGTGAGTACCAGGAACTC | 372 |
| | Probe | GCGTGAAGCTGGCCCTGGACATCG | 373 |
| | Reverse | AGCAGCTTGCGGTAGGTGGC | 374 |
| NM_001562 | Forward | TTGCTGAGCCCTTTGCTCCC | 375 |
| | Probe | CGACTGCCTGGACAGTCAGCAAGGAATTGT | 376 |
| | Reverse | AGCCAGAGTTGGCAGCCAGG | 377 |
| NM_005139 | Forward | GTGAGGAACACGCCGGCC | 378 |
| | Probe | TGCATCGAGCCTTGAAGGGTATTGGAACTG | 379 |
| | Reverse | TCTGGACACCATTATTCGGTTCAGA | 380 |
| NM_002638 | Forward | AGAGGCAGCTGTCACGGGAGTT | 381 |
| | Probe | GGCCGTGTTCCATTCAATGGACAAGATCC | 382 |
| | Reverse | CTGGACCTTTGACTGGCTCTTGC | 383 |
| NM_023915 | Forward | TTGTGTTTGGGTGATCATGGCTG | 384 |
| | Probe | GCCAAACATCATCCTGACAAATGGTCAGCC | 385 |
| | Reverse | AGCTGTTCACATAGGTGACTGCCG | 386 |
| NM_000424 | Forward | TCCTCTGGATATGGCAGTGGCA | 387 |
| | Probe | TATGGCGGTGGCCTCGGTGGAGG | 388 |
| | Reverse | CCACCGAGGCCGCCG | 389 |
| NM_001657 | Forward | GAGCACCTGGAAGCAGTAACATGC | 390 |
| | Probe | AGCAAGAATATTTCGGTGAACGGTGTGGGG | 391 |
| | Reverse | GGCAGCTATGGCTGCTAATGCA | 392 |
| NM_002575 | Forward | ATGGAGGACGCCTTCAACAAGG | 393 |
| | Probe | TGTTCCACCAAGCCATGGTGGATGTGAA | 394 |
| | Reverse | GCTGCTTCAGTGCCCTCCTCA | 395 |
| NM_000361 | Forward | CACCGACTGTGACTCCGGCA | 396 |
| | Probe | ACGGTGGCGACAGCGGCTCTGG | 397 |
| | Reverse | CGTCGGGCTGGGCGG | 398 |
| NM_001323 | Forward | CAGGCGGCCGTGGCC | 399 |
| | Probe | GAGACACGCACATCATCAAGGCGCAGAG | 400 |
| | Reverse | GGTCTTGCGGCAGTCTGTGCT | 401 |
| NM_001723 | Forward | TGTCATTGACCCTGTGAGAGGCA | 402 |
| | Probe | TTCGTGTTCCTCCAGAAATTGCTCTGCAGC | 403 |
| | Reverse | CTTGTGTTGCTGGATGGCTCATG | 404 |
| NM_001233 | Forward | TGGATCTGCAGCCATGCCC | 405 |
| | Probe | AGTTCCTGACGGTGTTCCTGGCCATTCC | 406 |
| | Reverse | TCCAGATGTGCAGACAGCTGAGG | 407 |
| NM_005564 | Forward | TTGCCAGCCCGGCGAG | 408 |
| | Probe | GAGTTACCTCGTCCGAGTGGTGAGCACCAA | 409 |
| | Reverse | CTTGAAGAACACCATAGCATGCTGG | 410 |
| NM_004669 | Forward | CGAGTCCCGCCGCCG | 411 |
| | Probe | ACGGCGACAGGCTCACGCTGGC | 412 |
| | Reverse | GCGCACACCGTGTCGACG | 413 |
| NM_003238 | Forward | TAGGGTGGAAATGGATACACGAACC | 414 |
| | Probe | ACAATGCCAACTTCTGTGCTGGAGCATGC | 415 |
| | Reverse | CCCTGCTGTGCTGAGTGTCTGAA | 416 |
| NM_001040084 | Forward | GGACAGCATCAAGAGTGAGACCCA | 417 |
| | Probe | CACTGGAGGAGGCCATGCTCACTGTGG | 418 |
| | Reverse | GCGTCCCTGCTCCCTTCATG | 419 |
| NM_001548 | Forward | TTCGGAGAAAGGCATTAGATCTGGA | 420 |
| | Probe | TGAAGCCCTGGAGTACTATGAGCGGGCC | 421 |
| | Reverse | TTCTCAAAGTCAGCAGCCAGTCTCA | 422 |
| NM_002820 | Forward | TCCAAGCCCTCTCCCAACACA | 423 |
| | Probe | AACCACCCCGTCCGATTTGGGTCTGAT | 424 |
| | Reverse | GCTGCTCTTTGTACGTCTCCACCTT | 425 |
| NM_015892 | Forward | AAGCAACAGTTTCTCATTCTTCGCC | 426 |
| | Probe | TCATGCATCCAACGTCAAGTACACCATGCA | 427 |
| | Reverse | CATCAAAGCCTCCTGCTTCTCACTT | 428 |
| NM_021101 | Forward | AGAAGATGAGGATGGCTGTCATTGG | 429 |
| | Probe | GGGTGCGATATTTCTTCTTGCAGGTCTGGC | 430 |
| | Reverse | TGCCATACCATGCTGTGGCAA | 431 |
| NM_005532 | Forward | CCCTGGCCAGGATTGCTACAGT | 432 |
| | Probe | CTCAGTGCCATGGGCTTCACTGCGG | 433 |
| | Reverse | GAGGACGAGGCGATTCCCG | 434 |
| NM_005130 | Forward | GGAACACAAAGCCCAGGAAGGA | 435 |
| | Probe | AGGGAGCACATCAAAGGCAAAGAGACCACC | 436 |
| | Reverse | CGGGAGCTTTGGTGGCCA | 437 |
| NM_002965 | Forward | GCTGGTGCGAAAAGATCTGCAA | 438 |
| | Probe | AAATGCAGACAAGCAGCTGAGCTTCGAGGA | 439 |
| | Reverse | CCTCGCCATCAGCATGATGAAC | 440 |
| NM_006820 | Forward | ACTTCTCAAAGCCGGGTCATGAAT | 441 |
| | Probe | TGCTTCAGATTTGGAACTGGACCCCATGAA | 442 |
| | Reverse | CCGCAGCATCTGCCTCAGTG | 443 |
| NM_000782 | Forward | TAAATACCCAGGTGTTGGGATCCAG | 444 |
| | Probe | TTGCGCATCTTCCATTTGGCGTTGG | 445 |
| | Reverse | TCGGCGACCAATGCACATTC | 446 |
| NM_001039348 | Forward | CTGTAAGTGCAATGCTTGTGCTCG | 447 |
| | Probe | ATCGTGGACCTGGAGATGCTGACAGTCAGC | 448 |
| | Reverse | TCTTAACACAGAGCTTGTGCGGAAG | 449 |
| NM_003641 | Forward | ATCCACAGCGAGACCTCCGTG | 450 |
| | Probe | CCGACCATGTCGTCTGGTCCCTGTTCA | |
| | Reverse | ATGAAGCCCAGACAGCACCAGTT | 451 |
| NM_005562 | Forward | CCTGCATCTGATGGACCAGCC | 452 |
| | Probe | CTTACTGGAGCAGAAGCTTTCCCGAGCCAA | 453 |
| | Reverse | CCAGCTCTGACATCATGGGCC | 454 |
| NM_024508 | Forward | GCTCCCCACAGGCATTGAGG | 455 |
| | Probe | GGTAGGCTCCTGGAGCAGGTGGGCAC | 456 |
| | Reverse | TGGCTGGCCCACAAAGCC | 457 |
| NM_001785 | Forward | GGGCATCTGTGCTGAACGGAC | 458 |
| | Probe | CGCTATCCAGAAGGCCGTCTCAGAAGGGT | 459 |
| | Reverse | GATAGCAATTGCCCTGAAATCCTTG | 460 |
| NM_000067 | Forward | AACAAAGGGCAAGAGTGCTGACTTC | 461 |
| | Probe | CTTCGATCCTCGTGGCCTCCTTCCTGAAT | 462 |
| | Reverse | TGGTCAGTGAGCCTGGGTAGGTC | 463 |
| NM_006417 | Forward | AGCCTGTGAGGTCCAAGCTAGAGG | 464 |
| | Probe | CCTCTGAGTGGGAGCTGGACCCTGTAAAGG | 465 |
| | Reverse | CCCATAGCATTCGTCTCAGAGCAG | 466 |
| NM_005531 | Forward | ATGGACGACTGACCACAATCAACTG | 467 |
| | Probe | CTGAAACTCACCTGCTTTGAATTGGCACCG | 468 |
| | Reverse | CAGATCTCAACTCCCCGGTATTCC | 469 |
| NM_002462 | Forward | TCCAGTCCAGCTCGGCAACA | 470 |
| | Probe | ACCTGATGGCCTATCACCAGGAGGCCAG | 471 |
| | Reverse | GATGTGGCTGGAGATGCGCTT | 472 |
| NM_003068 | Forward | TGGGCGCCCTGAAGATGC | 473 |
| | Probe | TTGTGTTTGCAAGATCTGCGGCAAGGC | 474 |
| | Reverse | CTTGAAGCAACCAGGGTCTGGAA | 475 |
| NM_001753 | Forward | GGAAGGCCAGCTTCACCACCT | 476 |
| | Probe | CCGCTTGCTGTCTGCCCTCTTTGGC | 477 |
| | Reverse | ACAACTGCCCAGATGTGCAGGA | 478 |
| NM_002089 | Forward | CCTGCGGGTGGCGCTG | 479 |
| | Probe | TGCTCCTGCTCCTGGTGGCCGC | 480 |
| | Reverse | GCACTGGCAGCGCAGTTCAG | 481 |
| NM_001432 | Forward | CGCCCTGCCCGTGCAC | 482 |
| | Probe | CGCAGCCGCCCTCCGCCA | 483 |
| | Reverse | CGCGGTCATCGGCGATG | 484 |
| NM_000577 | Forward | AGGGAAGATGTGCCTGTCCTGTG | 485 |
| | Probe | CTGGTGATGAGACCAGACTCCAGCTGGAGG | 486 |
| | Reverse | TCTGAGCGGATGAAGGCGAAG | 487 |
| NM_017654 | Forward | TCACAAAGGAAAAATTGACCAGTGC | 488 |
| | Probe | TGGCAGAGTGGAGATGTGTGGAAGGAGGA | 489 |
| | Reverse | AGCTCGACCTTGTAAACGAAGCAA | 490 |
| NM_002444 | Forward | CTAGTGCTGACCTACGGGCTGATG | 491 |
| | Probe | GGCCAAGGACCGCAGTGAGGAGGAAC | 492 |
| | Reverse | GGTGCTTCTGCACACGCTCATT | 493 |
| NM_000433 | Forward | GGTGACCAAGGCTTTCCAGATGA | 494 |
| | Probe | TCAGCTTAAGAAAGGCAGCCAAGTGGAGGC | 495 |
| | Reverse | TCCTGAAACTCCAGGTCCTCTGGT | 496 |
| NM_014398 | Forward | ATTTACCAAGGAATCAAACATGCGG | 497 |
| | Probe | CCTTCAAGTGCGTGAGTGAACAGAGCCTCC | 498 |
| | Reverse | CACCTGCAGGTGGGCTGACA | 499 |
| NM_002306 | Forward | CACGCTTCAATGAGAACAACAGGAG | 500 |
| | Probe | TCGGTTTTCCCATTTGAAAGTGGGAAACCA | 501 |
| | Reverse | CCTTGAAGTGGTCAGGTTCAACCA | 502 |
| NM_020672 | Forward | CAACGCAGAGGATGCTCAGGAA | 503 |
| | Probe | TTCAGTGATGTGGAGAGGGCCATTGAGACC | 504 |
| | Reverse | GCTGCTGGGTGACCAGGTCC | 505 |
| NM_001040147 | Forward | TCTGGGATTGCTTCGGGGG | 506 |
| | Probe | AGGTCACTGAGGAGGGCACCGAGGCTACT | 507 |
| | Reverse | GCGTGGACTGAGGGAGTTGCTT | 508 |
| NM_001699 | Forward | GCTGCGGGAAGATTTGGAGAAC | 509 |
| | Probe | GAAGGCCTTGCCTCCTGCCCAGGAG | 510 |
| | Reverse | TCCACCCTCATCCATGTTGACATAG | 511 |
| NM_012427 | Forward | GGTGCGAGGATGCTTACCCG | 512 |
| | Probe | CAGATAGATGACACCATGTTCTGCGCCGG | 513 |
| | Reverse | CCTGGCAGGAGTCTCTACCTGCTT | 514 |
| NM_001039492 | Forward | CACCGCCTGCAGGAAGCAG | 515 |
| | Probe | GCAGCGCTTCACAGCTCGCGATGA | 516 |
| | Reverse | ACAAGTCACAGAAGCAGTTCAGGCA | 517 |
| NM_003088 | Forward | CGGCTGCCGCAAGGTCA | 518 |
| | Probe | GGCACCCTGGACGCCAACCGC | 519 |
| | Reverse | AACTCCAGCTGGAAGACGTCATAGC | 520 |
| NM_005522 | Forward | AAGCAGCTCACGGAACTGGAGAA | 521 |
| | Probe | GCGCGCCCGCAGGGTGGA | 522 |
| | Reverse | GAGCTGCAGGGATGCAGCG | 523 |
| NM_001032409 | Forward | TGGAGGCAGCTGGCACAAGA | 524 |
| | Probe | GCTGAGGCCTGGCTGAATTACCCATGCT | 525 |
| | Reverse | GAATCCAGGAGCTCACTGGGGA | 526 |
| NM_012242 | Forward | CCCGGGCGGGAATAAGTACC | 527 |
| | Probe | AACTACCAGCCGTACCCGTGCGCAGAG | 528 |
| | Reverse | AGCGCAGTACTCATCAGTGCCG | 529 |
| NM_006528 | Forward | TATGGGCTTCTGCGCACCAA | 530 |
| | Probe | GAGGGACTGTGCTCTGCCAATGTGACTCG | 531 |
| | Reverse | TCCACAGCCAGTATAGGTGAAAGCA | 532 |
| NM_002192 | Forward | AAGGACATCGGCTGGAATGACTG | 533 |
| | Probe | CTGGCTATCATGCCAACTACTGCGAGGGTG | 534 |
| | Reverse | CCGGACGTGCCTGCTATATGG | 535 |
| NM_005864 | Forward | CTCATCGCCTGGTGTTTGTTGG | 536 |
| | Probe | CCTCTGAGAGCACAGGTCAGGGCTGCA | 537 |
| | Reverse | GCCTGGCCCAGTGCTGTACC | 538 |
| NM_003897 | Forward | AAGCGCAGCCGCAGGGT | 539 |
| | Probe | TCTCTACCCTCGAGTGGTCCGGCGC | 540 |
| | Reverse | CGGTTCCTCGACTGGCAGCT | 541 |
| NM_002658 | Forward | GGGAGTGTCAGCAGCCCCAC | 542 |
| | Probe | GTGTGCTGCTGACCCACAGTGGAAAACAGA | 543 |
| | Reverse | TCATGCGGCCTTGGAGGG | 544 |
| NM_000245 | Forward | GGGAGAAGACTCCTACAACCCGAAT | 545 |
| | Probe | CACCCTAAAGCCGAAATGCGCCCATC | 546 |
| | Reverse | CGCTGATATCCGGGACACCAG | 547 |
| NM_000228 | Forward | TATGCTGAGTTGAAGGACCGGTTG | 548 |
| | Probe | GGTCAGAGTTCCATGCTGGGTGAGCAGG | 549 |
| | Reverse | TCTGTCTTCACACTCTGGATCCGG | 550 |
| NM_000064 | Forward | ATTGAGCAGACCATCAAGTCAGGCT | 551 |
| | Probe | GCAGGTTGGACAGCAGCGCACGTTC | 552 |
| | Reverse | GCTTCAGGGCTTCTCTGCACTTG | 553 |
| NM_004335 | Forward | AGGCCCAGGCCGCCAC | 554 |
| | Probe | CTGCAACCACACTGTGATGGCCCTAATGG | 555 |
| | Reverse | ATCTCTCCCTCAAGCTCCTCCACTT | 556 |
| NM_003236 | Forward | AGGAGGACAAGCCAGCATGTGTC | 557 |
| | Probe | CATGCGGACCTCCTGGCCGTGG | 558 |
| | Reverse | AGGCGGTGATGGCCTGCTT | 559 |
| NM_001042454 | Forward | CTGCAGGGAATGCTTCGCG | 560 |
| | Probe | GCGAGAACCACTTCCACGCACGACG | 561 |
| | Reverse | GGCCACACGTGGCGCAC | 562 |
| NM_003174 | Forward | TTCCCAGCTGGGAGCACAGAG | 563 |
| | Probe | TCCAATCAGATCACCCTCGTGGAAGACGTC | 564 |
| | Reverse | TGGCCAGGAGGTCGGCC | 565 |
| NM_013451 | Forward | GGAGGCCGACGAGAGGCC | 566 |
| | Probe | TGGTTCACCAACCCATGCAAGACCATGA | 567 |
| | Reverse | CGGCGCCACACGATGAACT | 568 |
| NM_020299 | Forward | AAGGAGATTGCTGCAAAGCACAAA | 569 |
| | Probe | GCAGCCCAGGTTCTGATCCGTTTCCATATC | 570 |
| | Reverse | ACCTGAATGTTCTCAACAATGCGTG | 571 |
| NM_022337 | Forward | AGTCTCCCTAATGGCAAACCGGT | 572 |
| | Probe | TGTGCTCATGAACAATGGCCTCAAGATGGA | 573 |
| | Reverse | ACGAAACCGTGCTCCTTGCAG | 574 |
| NM_002068 | Forward | CCACCTCCCACCTGGCTACCTA | 575 |
| | Probe | TTTCCAGGGCCCTAAGCAGGATGCTGAG | 576 |
| | Reverse | ATGTCCAGGATGAACCTCTTGGCT | 577 |
| NM_001024847 | Forward | GTTCCAAGGTGCGGGAGCAC | 578 |
| | Probe | ATTCCCAGCTTCTGGCTCAACCACCAGG | 579 |
| | Reverse | GGTCGTGGTCCCAGCACTCAG | 580 |
| NM_000919 | Forward | TGCTGGCCATTGCCATATTTATTC | 581 |
| | Probe | CAAGGGCCTTTGGAGCAGATTCTGAACACA | 582 |
| | Reverse | AAGCCTCCACTTCCCTTTCCTCTAA | 583 |
| NM_001333 | Forward | GCAGTCGCAACTGTGGGGC | 584 |
| | Probe | CTATGGATGCAGGCCATTCGTCCTTCCAG | 585 |
| | Reverse | CACCAGAACACCATGATCCAGGTT | 586 |
| NM_178140 | Forward | AACGGCATGTCCGTGGCAG | 587 |
| | Probe | GCCGCGCCTGGCCAGCCA | 588 |
| | Reverse | CGCCAGTCGGCCTGGGT | 589 |
| NM_000213 | Forward | TTCGGGCCAGAGCGCG | 590 |
| | Probe | CCATAGAGTCCCAGGATGGAGGACCCTTCC | 591 |
| | Reverse | AGCGGGTGCTGGAAGAGCC | 592 |
| NM_007350 | Forward | CGCAGCCGCAGCTCCAG | 593 |
| | Probe | CCCAGCCTCAGCCTCAGCCGCA | 594 |
| | Reverse | GATGCGGATACGGGTGGAGC | 595 |
| NM_002038 | Forward | CGGCTCCGGGTTCTGGAAG | 596 |
| | Probe | ACTCGCAGTCGCCGGGCTGCC | 597 |
| | Reverse | GTTGGCCGCGATGCCG | 598 |
| NM_000141 | Forward | TGCACCAACGAACTGTACATGATGA | 599 |
| | Probe | TTGGCATGCAGTGCCCTCCCAGAGA | 600 |
| | Reverse | TGGCTGAGGTCCAAGTATTCCTCAT | 601 |
| NM_002705 | Forward | TCCACCCTGACACAGGCCG | 602 |
| | Probe | CGGAGGAAGCCCACCGTGCCG | 603 |
| | Reverse | CTGGCTTCTGAGTTTCACGAACATG | 604 |
| NM_006665 | Forward | GGTGGATGATCAAACCTTGCCAC | 605 |
| | Probe | CTCTCCGGCCAGGAAGTTCACTGGGC | 606 |
| | Reverse | TCAGATGCAAGCAGCAACTTTGG | 607 |
| NM_004688 | Forward | AAAGTTCCGAAATGGAGGCGG | 608 |
| | Probe | GAGGTGGACCGCGTGGACTATGACAGACA | 609 |
| | Reverse | ATCTCCACAAACGTGATGACTGCAC | 610 |
| NM_021105 | Forward | GTGCAGCTGTTGTGGAGATGTTGAT | 611 |
| | Probe | GTGTGGTTGGCAAAATTTCCAAGCACTGGA | 612 |
| | Reverse | TCAGCGTCTGTAAATGCCTCTCTCA | 613 |
| NM_002727 | Forward | CTTCCAGGTGAATCCAACAAGATCC | 614 |
| | Probe | GGACTACTCTGGATCAGGCTTCGGCTCCG | 615 |
| | Reverse | TCCTGATCCAGAGCCGGAGC | 616 |
| NM_006670 | Forward | AATGAGGAATCGGGTCCTCTTGG | 617 |
| | Probe | CAACAGTGCTGACCTGGACTGTGACCCG | 618 |
| | Reverse | ACATAAGAGGTTTGCAGGGATGGG | 619 |
| NM_014314 | Forward | GGAATGCCATTACACTGTGCTTGG | 620 |
| | Probe | TGCTTTGTGAGTAGACCACATCCCAAGCCA | 621 |
| | Reverse | GTCATGGCTGCAGTTCTGTCGG | 622 |
| NM_002526 | Forward | TCGAGTGCCCAGTTATGACCCTC | 623 |
| | Probe | AAGGTGATCCTCCCAAACTTCCTGGCCAA | 624 |
| | Reverse | TTATCATCTGGAACCCATCTCCACC | 625 |
| NM_003877 | Forward | GTTCAGATGTGCAAGGATAAGCGG | 626 |
| | Probe | CCCGGAACGGCACTGTTCACCTTTATCTG | 627 |
| | Reverse | ATGGTGCTGACGTGTAGAGCGG | 628 |
| NM_003702 | Forward | GGTGAGCTTAGACTCCCGGGTG | 629 |
| | Probe | ACATGGTGGAGCCATCCCAACACATATTCG | 630 |
| | Reverse | GACAGCAGAGTTCATGAATCGAGGA | 631 |
| NM_001814 | Forward | AGGGGATCTACCACCACACTGGTC | 632 |
| | Probe | AATCATGCTGTTCTGCTTGTGGGCTATGGC | 633 |
| | Reverse | ATCCATCCCAGAGGCTGAGTCAGT | 634 |
| XM_034274 | Forward | TTTAAGAATGCGCTTGCTGCTCA | 635 |
| | Probe | TTGTGTCCCAGCCACTTGCTTTCTTGGAAG | 636 |
| | Reverse | GCAGGTTCATCTTCCTCTTTGAGGA | 637 |
| NM_000576 | Forward | ATACCTGTGGCCTTGGGCCTC | 638 |
| | Probe | TGTCCTGCGTGTTGAAAGATGATAAGCCCA | 639 |
| | Reverse | TTGTTGAAGACAAATCGCTTTTCCA | 640 |
| NM_002178 | Forward | ACCTCTACCACGCCCTCCCAG | 641 |
| | Probe | ATTCTGCGGGTGTCCAAGACACTGAGATGG | 642 |
| | Reverse | GCAGCACTGAGTCCAGATGTCTACG | 643 |
| NM_005268 | Forward | CCTCTTCATGGTGGCCACAGC | 644 |
| | Probe | ATCTGCATCCTGCTCAACCTCGTGGAGCT | 645 |
| | Reverse | CCTTGCTGCCAGGCACTCG | 646 |
| NM_002281 | Forward | CCTGCTGGAGGGCGAGGAG | 647 |
| | Probe | GGGCTGTGAATGTCTGTGTCAGCAGCTCC | 648 |
| | Reverse | GGGAGCCTGACACGCAGAGG | 649 |
| NM_018351 | Forward | CAGAGACACTCAAGATGCCCTTGC | 650 |
| | Probe | TAGCCAACCACGCCAATGACACCATGAA | 651 |
| | Reverse | ACCCGACCAGGCTGCACAAT | 652 |
| NM_020183 | Forward | GGAGCTAGAGGCTACCAGGCAAAA | 653 |
| | Probe | ACTGTTGCTGTCCACAGCCATGAGCCACT | 654 |
| | Reverse | CCAACTGTGCACCATCACTGAGG | 655 |
| NM_001032731 | Forward | TGATGGGTTCACCATCCAGGTG | 656 |
| | Probe | GAATCTCTTTCGAGGTGCTGGCCGCC | 657 |
| | Reverse | CACCCAGCAATGCTTACTCAGAGC | 658 |
| NM_003022 | Forward | ATGTGCTTGGTTTCCTAGAAGCCAA | 659 |
| | Probe | TTGCAGCCAATGAAGAGAATCGGAAGTGGA | 660 |
| | Reverse | GGGTAACCTGTGGCTGGTCGAC | 661 |
| NM_001030011 | Forward | TGCTGGGCTCCATTGGGC | 662 |
| | Probe | CGTCGGCAACAACCTGCTGGTGCTC | 663 |
| | Reverse | GGAGGTGAGTGGGAGTGCGG | 664 |
| NM_003761 | Forward | GGAAGCCAGTGAAGGTGGAGGA | 665 |
| | Probe | AATGATCGTGTGCGGAACCTGCAAAGTGA | 666 |
| | Reverse | CCCGGGCCAGGATCCG | 667 |
| NM_000700 | Forward | GTTCTGGACCTGGAGTTGAAAGGTG | 668 |
| | Probe | CAGCTATCGTGAAGTGCGCCACAAGCAA | 669 |
| | Reverse | GAAGCTTCTCTGCAAAGAAAGCTGG | 670 |
| NM_004403 | Forward | AGCGCAGCAGCTCTGCTGG | 671 |
| | Probe | TGCTGCAAACTCCAGATCATTCCCACACTG | 672 |
| | Reverse | CATCATCAGACAGAGCACGAAGCA | 673 |
| NM_003064 | Forward | TCTGTCCTCCTAAGAAATCTGCCCA | 674 |
| | Probe | CCTGAGTGCCAGAGTGACTGGCAGTGTCC | 675 |
| | Reverse | GGATCCAGGCATTTGATGCCA | 676 |
| NM_000295 | Forward | ACCTATGATCTGAAGAGCGTCCTGG | 677 |
| | Probe | AAGCTCTCCAAGGCCGTGCATAAGGCTG | 678 |
| | Reverse | CCTTTCTCGTCGATGGTCAGCA | 679 |
| NM_007150 | Forward | CTGCACGCTATAGCAACGTCAGC | 680 |
| | Probe | GCATTGAGGACTCATTCGCCATGGAGAAGA | 681 |
| | Reverse | GAGTGCTGCCACATGGAGGCT | 682 |
| NM_005168 | Forward | AGCTCTCCAATCACAGGCAGACG | 683 |
| | Probe | GGGCAAATATGGCCAAACAGATTGGAGCA | 684 |
| | Reverse | TCCGACTGTAAAGCTGAGCATTCG | 685 |
| NM_006547 | Forward | GCAGAGTTATTGGAAAAGGAGGCAA | 686 |
| | Probe | TTGTTGTCCCTCGTGACCAGACACCTGATG | 687 |
| | Reverse | ACCTGGCAAGCATAGAAGTGACCA | 688 |
| NM_001423 | Forward | TCATCTTCTGTGTCATTGCCCTCC | 689 |
| | Probe | GGTCTTCGTGTTCCAGCTCTTCACCATGGA | 690 |
| | Reverse | CCTGAGAGGAAGAACCGGTTTCC | 691 |
| NM_002353 | Forward | ACATCAAGGGCGAGTCTCTATTCCA | 692 |
| | Probe | GGCCGCGGCGGCCTGGA | 693 |
| | Reverse | CCGCGCACGCGCAAG | 694 |
| NM_023038 | Forward | ACCCAGTGCCAGGCCGC | 695 |
| | Probe | CCTCCCCAGGCCAGGAGGTGCATC | 696 |
| | Reverse | CAAGTGCTGCCAGAGGCCG | 697 |
| NM_005567 | Forward | CAGAGCTGCTGGAACTACGGCTT | 698 |
| | Probe | TCCTGCTCCTCGGACGAGCTCCCTG | 699 |
| | Reverse | AGCCGCCAGACTTGGTGAGG | 700 |
| NM_001793 | Forward | ACGTGGCACCAACCATCATCC | 701 |
| | Probe | CCATGTACCGTCCTCGGCCAGCCA | 702 |
| | Reverse | AGTCGAACACCAAGAGGGTGTCG | 703 |
| NM_002275 | Forward | GGCTCATTGGTGGCCTGGAG | 704 |
| | Probe | GATGCGAGATGGAGGCTCAGAACCAGGAG | 705 |
| | Reverse | GTAGCGATCTCCTGCTCCAGCC | 706 |
| NM_015657 | Forward | GTTCATGCAGCTGCACTTTCCAA | 707 |
| | Probe | ACCAGTCACAGCAGGAGGAGTCGCAAACA | 708 |
| | Reverse | AAGCAGTCTTGTTGGTTTCCAGCA | 709 |
| NM_006290 | Forward | ACAGAAGAGCAACTGAGATCGAGCC | 710 |
| | Probe | AGAGATGTGCCTCGAACCACACAAAGCACC | 711 |
| | Reverse | GTTCTTGCAGGAGGCCCGG | 712 |
| NM_005429 | Forward | CCTGGAAAATGTGCCTGTGAATGTA | 713 |
| | Probe | CCACCACCAAACATGCAGCTGTTACAGACG | 714 |
| | Reverse | CAAGCCTTCTGGCGGTTCGTA | 715 |
| NM_006084 | Forward | CTGGAATGCACCCCAGGCTC | 716 |
| | Probe | CACCTGGGCCAGGCCCGCATC | 717 |
| | Reverse | GCACTCGTTGCTGGGCAGC | 718 |
| NM_013352 | Forward | AATGGGGGCTTGATTAAAGGCC | 719 |
| | Probe | TTTGGACAGGCACGGATGGTGACAACTACA | 720 |
| | Reverse | AGGAAGCAGACAGTGATGGGGC | 721 |
| NM_138444 | Forward | GACGCCAAGTTCCGGCGA | 722 |
| | Probe | CGCATCACCGTTTGCGGAAAGACGTC | 723 |
| | Reverse | CCCAAACACCTCCTTGGCCA | 724 |
| NM_001511 | Forward | CTGCGAGTGGCACTGCTGCT | 725 |
| | Probe | GCTCCTGGTAGCCGCTGGCCGG | 726 |
| | Reverse | GACGCTCCTGCTGCGCG | 727 |
| NM_004616 | Forward | CGTTGCTGTGGACATATTGATTGCT | 728 |
| | Probe | TCATGATTCTGGGCTTCCTGGGATGCTG | 729 |
| | Reverse | AACAACAGAAGCATGCAGCGACTT | 730 |
| XM_049037 | Forward | CCAGCAGCAAATTAATCAACAGCAG | 731 |
| | Probe | CTCCAGCTGCAGCAGCTGCAACACATG | 732 |
| | Reverse | GGAGAAGGCTGAGACTGGTGCTG | 733 |
| NM_001002231 | Forward | GCCTGTCAGAGCCTGCCAAGA | 734 |
| | Probe | TCACAGATGTTGTGAAGGTCCTGGGCCTG | 735 |
| | Reverse | TGCTGGCTCCTGGGTGGG | 736 |
| NM_001003799 | Forward | TCAAGGTATTTGGTCCCGGAACA | 737 |
| | Probe | CAACTTGATGCAGATGTTTCCCCCAAGCC | 738 |
| | Reverse | AGCCTTCTGGAGCTTTGTTTCAGC | 739 |
| NM_000477 | Forward | CTGAAACATTCACCTTCCATGCAGA | 740 |
| | Probe | TGCACTTGTTGAGCTCGTGAAACACAAGCC | 741 |
| | Reverse | AGCTTTCAGTTGCTCTTTTGTTGCC | 742 |
| NM_006061 | Forward | ATTGTCCTGCTGGTAATTGGGCTAA | 743 |
| | Probe | TCCCTTATGAACAAGGAGCACCTTGTGCCA | 744 |
| | Reverse | ATTGGTGCATAGTCCATCGTCACAG | 745 |
| NM_001174 | Forward | GCTGCACAAGCAGAAGTCATCAGAC | 746 |
| | Probe | CAGTTCAGAGTTCAGCCCGGGCTGAGG | 747 |
| | Reverse | ACAGCGATGATGGCCGTGC | 748 |
| NM_016269 | Forward | TGAGAGCGAATGTCGTTGCTGAG | 749 |
| | Probe | AACCAGATTCTTGGCAGAAGGTGGCATGC | 750 |
| | Reverse | TTTAGCCTGCTCTTCACGGGAGA | 751 |
| NM_030781 | Forward | CCCACCAGGCAAAGAGGGACT | 752 |
| | Probe | GGCCCTCAGGGCCCTCCTGGCT | 753 |
| | Reverse | CCAACGGTGCCCTGAAGTCC | 754 |
| NM_001014986 | Forward | AAGCAAGCATGTCATCTATGCTCCA | 755 |
| | Probe | GCAGCCACAACAAGTATGCAGGGGAGTCA | 756 |
| | Reverse | CAGGCCTTGGAAGGGTCCACT | 757 |
| NM_000905 | Forward | CACCATGCTAGGTAACAAGCGACTG | 758 |
| | Probe | CTGCTCGTGTGCCTGGGTGCGCT | 759 |
| | Reverse | CGGGTTGTCCGGCTTGGA | 760 |
| NM_007253 | Forward | TCAACATCTTCGCAATCCATCACA | 761 |
| | Probe | CCCTCAGTCTGGCCAGACCCTGAGGTCT | 762 |
| | Reverse | TGCCCGATGCAGTTCCTGG | 763 |
| NM_000044 | Forward | CAAGGAACTCGATCGTATCATTGCA | 764 |
| | Probe | CCACATCCTGCTCAAGACGCTTCTACCAGC | 765 |
| | Reverse | AATAGGCTGCACGGAGTCCAGG | 766 |
| NM_004114 | Forward | GAGATCATGAAAGGCAACCATGTGA | 767 |
| | Probe | TACAAGGAGCCATCACTGCACGATCTCACG | 768 |
| | Reverse | GGTCCCGCTTCCAGATCGG | 769 |
| NM_000601 | Forward | AAGATTGGATCAGGACCATGTGAGG | 770 |
| | Probe | GGATTATGGTGGCCCACTTGTTTGTGAGCA | 771 |
| | Reverse | ACCAGGAACAATGACACCAAGAACC | 772 |
| NM_005084 | Forward | TGGACATTCTTTTGGTGGAGCAAC | 773 |
| | Probe | GATGTGGTATTGCCCTGGATGCATGGATGT | 774 |
| | Reverse | GAGGGGCTGAGGAATTCTGGAATAT | 775 |
| NM_001030047 | Forward | GACCTGCCCACCCAGGAGC | 776 |
| | Probe | AGCACTGGGGACCACCTGCTACGCCT | 777 |
| | Reverse | AAGAACTCCTCTGGTTCAATGCTGC | 778 |
| NM_002736 | Forward | GAATGGTGCAGTAGAAATCGCTCG | 779 |
| | Probe | GCTCGCGGGGACAGTACTTTGGAGAGCTT | 780 |
| | Reverse | GGCGTGGGCAGAAGCTGC | 781 |
| NM_001099 | Forward | GAGTGGCCTACAGATGGCGCTAG | 782 |
| | Probe | ACGGACTCCTTCCTCCCTATGCTTCTTGCC | 783 |
| | Reverse | ATACGGCTCGTGCTGCGTCTC | 784 |
| NM_020974 | Forward | GTTCAAGTCCAATGAAGGGAACAGC | 785 |
| | Probe | GCTAGAGGGTTCCAGGTCCCATACGTGACA | 786 |
| | Reverse | AGAGCCTGCCATCTCGAACTATGTC | 787 |
| NM_015900 | Forward | TCACCATACCTAAGCAGCAACGCT | 788 |
| | Probe | ATGGGAAAGGAATCATAGCCCATGCCACC | 789 |
| | Reverse | TCACTTGGTTTATCTGGCATTGTGG | 790 |
| NM_004867 | Forward | AGTTGCTGTGGAGGAAATTCGTGAT | 791 |
| | Probe | ATAACAGAAAGTCCTTCCGCCTTCGTCGCA | 792 |
| | Reverse | GTTTGTTGAAACCCAGCAAGAGGTC | 793 |
| NM_013243 | Forward | ATGGAAGCTTGAAGGATTCCACAAA | 794 |
| | Probe | TCCAACCCAGGAGGAAAGACAGATGAACCC | 795 |
| | Reverse | TGATGGCTTCCAAATAGGCTTCTGT | 796 |
| NM_003706 | Forward | CGCCAGCTGCTACATCCTGAAA | 797 |
| | Probe | TCCCCTGTTCAACATAGATGCCTGTGGAGG | 798 |
| | Reverse | TCGTATGTGTCACTCCATGCCTCA | 799 |
| NM_004449 | Forward | GAAGCGCTACGCCTACAAGTTCG | 800 |
| | Probe | CTTCCACGGGATCGCCCAGGCC | 801 |
| | Reverse | CCATGTACGGGAGGTCTGAGGG | 802 |
| NM_198795 | Forward | TGTTCTGAGAATGGGACTGTCGATG | 803 |
| | Probe | TCTGGCAAAAAACATCACACCTCAAAGGCA | 804 |
| | Reverse | TCTGTGCAGCAGCAATTCATCCTAT | 805 |
| NM_005622 | Forward | CCATTTGAGGTAGAAAATGCCCTGA | 806 |
| | Probe | TCAGTTGCAGAGTCAGCTGTTGTCAGCAGC | 807 |
| | Reverse | ACCTCTCCTCTGATGGGGTCTGG | 808 |
| NM_000689 | Forward | GCCATAACAATCTCCTCTGCTCTGC | 809 |
| | Probe | GCAGGAACAGTGTGGGTGAATTGCTATGGC | 810 |
| | Reverse | GGGGCACTGGGCACTTACCA | 811 |
| NM_014906 | Forward | TCCCCGGGAAACAGAGTTTCTAGA | 812 |
| | Probe | CGCCACCACTACTCAAAGAAGTGGCACAGA | 813 |
| | Reverse | GGACAGGCTAGTGCCTATTTTGTGG | 814 |
| NM_021244 | Forward | TTCCTGGCTCTCGTTTGCTTTGT | 815 |
| | Probe | TTCATTGCTTCCGGAAGGCCATTCATGA | 816 |
| | Reverse | CAGCCGATTCTGAACCTTTCGAG | 817 |
| NM_005613 | Forward | TCCAGGCAACCAAAGAGGTGAAC | 818 |
| | Probe | TTGCACCAGGGAAGAGACAAGCCGGA | 819 |
| | Reverse | GCGGTAGGAATCCTTCTCCATCAG | 820 |
| NM_021076 | Forward | CAGAGGTAGCCAAGAAGGAACCAGA | 821 |
| | Probe | AGCAGAGAAGAAGGAGGCAGCACCGGAG | 822 |
| | Reverse | AGGCTTCTTGGCCTTCTCCTCC | 823 |
| NM_001041 | Forward | TGGCGTCAGAGGACAATTTCAAAC | 824 |
| | Probe | TCCGTGGTGGTCACATCCTACCATGTCAAG | 825 |
| | Reverse | TCTGCAGCAACAATGAGCTTCATG | 826 |
| NM_021139 | Forward | CATCATGATCAACCAGTGAAGCCC | 827 |
| | Probe | GAGCCAAGCACCTTCGGGTTGCAGC | 828 |
| | Reverse | GGTACTGGAACCAGGTGAGGTCGT | 829 |
| NM_015460 | Forward | GCCCTGACCATTGCAGGATTAAA | 830 |
| | Probe | CGCTTCACAAGAAGACGGGATCAGAAGCAA | 831 |
| | Reverse | TTCCTCCTTTGCTGCCTTGATGTA | 832 |
| NM_005097 | Forward | TTCCAGGATATTCAGAGGATGCCAT | 833 |
| | Probe | GCGAGGATCCATGGTGTTCCAGCCTCTT | 834 |
| | Reverse | TTGGCTTTCTCTGCATCCCAGTT | 835 |
| NM_000922 | Forward | GTGGTGATGATGAAGACGGTGAAGA | 836 |
| | Probe | CCACCAAGAAGGAAAAGCAGACGGCGA | 837 |
| | Reverse | AGTGAGGTGGTGCATTAGCTGACAA | 838 |
| NM_017770 | Forward | CACAGGCTCAGCTGGTGCAGTT | 839 |
| | Probe | TGCTCGCCATCACGCACACCATGA | 840 |
| | Reverse | ACACGGTTTCACGACGGCG | 841 |
| NM_000814 | Forward | TGGCGATACCAGGAATTCAGCA | 842 |
| | Probe | CAGAGCATGCCTCGAGAAGGGCATGG | 843 |
| | Reverse | CTGTGAAGACCTCCTCCGTAGATGG | 844 |
| NM_000681 | Forward | CGCGTCGGGGCTGCC | 845 |
| | Probe | AGGCGTCGCGCTGGCGCG | 846 |
| | Reverse | AAGCGCTTCTCGCGGTTCTG | 847 |
| NM_023929 | Forward | TCATGTTAGCAGCCAGTGTTGGAAT | 848 |
| | Probe | TGTGCAGATAAATCACAGCCAGGAGGGCA | 849 |
| | Reverse | CCGAGGGAATTCTGTATCCTGTCC | 850 |
| NM_002465 | Forward | GTTCAGCAACCAGGGAGTCTGTACC | 851 |
| | Probe | CTGCTGCAAAGCAGTCAATGACCTTGGGA | 852 |
| | Reverse | CCTCCAGTTTGCATTCAATCTCCA | 853 |
| NM_000685 | Forward | CCAAATCCCACTCAAACCTTTCAAC | 854 |
| | Probe | AATGAGCACGCTTTCCTACCGCCCCTC | 855 |
| | Reverse | TGCAGGCTTCTTGGTGGATGAG | 856 |
| NM_000187 | Forward | CAAGGTGGGTTCCTGCCAGG | 857 |
| | Probe | GATGCTGACTGCTTTGAGAAGGCCAGCAAG | 858 |
| | Reverse | AATCCTCTCAGGTGCCAGCTTGA | 859 |
| NM_021136 | Forward | AGGAACTGAGGAGGCTCTTCCTTGT | 860 |
| | Probe | TGATGTGGCTCCTGACCTACGTTGGCG | 861 |
| | Reverse | CCACAGCCATGAGCAGCAGG | 862 |
| XM_377774 | Forward | GAACTGCCCAAGCTGGAGAAGC | 863 |
| | Probe | TGCCACGGCGGAGCGCGTC | 864 |
| | Reverse | TCCCGCATGGCGTTCTCC | 865 |
| NM_014243 | Forward | TCTTCAGTGGGAGGTCCAAATGC | 866 |
| | Probe | GCCAGAGGAGTGCTCAGCAAGCAGGAAGT | 867 |
| | Reverse | TGGTACGGTGACCAGTCTCACAGTC | 868 |
| NM_000130 | Forward | GGCAATTATAACACAGGGCTGCAA | 869 |
| | Probe | AGCAGGGAGTGGAATGGAAACCATACAGGC | 870 |
| | Reverse | TCTTGTCCACCATGGAGGATTTCA | 871 |
| NM_018593 | Forward | CAATTGGATTTCTGCTCGGATTCA | 872 |
| | Probe | TGACTGTTGGCCCACCCATTGCAGG | 873 |
| | Reverse | CACATCATAGGAGCCCAGTTTGTCA | 874 |
| NM_002407 | Forward | CCTCGCCATGAAGCTGCTGAT | 875 |
| | Probe | TGCTGGCGGCCCTCCTCCTGC | 876 |
| | Reverse | TCAACCATGTCCTCCAGGAGTTTG | 877 |
| NM_004431 | Forward | CCTCAAGACCCTGGCTGACTTTG | 878 |
| | Probe | GTGCCCTTCCGCACGGTGTCCG | 879 |
| | Reverse | TGCTGCATCTTGATGGACTCCAG | 880 |
| NM_022361 | Forward | GGCATTTTTCAGGTAACCCTCACTG | 881 |
| | Probe | TGCTCTTTGCTCAGCATCGCTACATCTCCC | 882 |
| | Reverse | CTGCAATGTCACTGCCAATTAGCA | 883 |
| NM_015141 | Forward | GCTGCGGGGTGGCCG | 884 |
| | Probe | TGATCACCACCTGTTACGGAGGGCGG | 885 |
| | Reverse | CTCGGCCACCCTGCGGT | 886 |

### DETAILED DESCRIPTION OF THE INVENTION

[0075] The present invention describes the identification of polynucleotides that correlate with drug sensitivity or resistance of untreated cell lines to determine or predict sensitivity of the cells to a drug, compound, or biological agent. These polynucleotides, called marker or predictor polynucleotides herein, can be employed for predicting drug response. The marker polynucleotides have been determined in an in vitro assay employing microarray technology to monitor simultaneously the expression pattern of thousands of discrete polynucleotides in untreated cells, whose sensitivity to compounds or drugs, in particular, compounds that modulate, e.g., inhibit, protein tyrosine kinase or protein tyrosine kinase activity is tested. The protein tyrosine kinases, or activities thereof, associated with response to a drug, compound, or biological agent include, for example, members of the Src family of protein tyrosine kinases, for example, Src, Fgr, Fyn, Yes, Blk, Hck, Lck and Lyn, as well as the Bcr-abl, Jak, PDGFR, c-kit and Eph receptors protein tyrosine kinases. (See, e.g., P. Blume-Jensen and T. Hunter, “Oncopolynucleotide Kinase Signaling”, Nature, 411:355-365 (2001)).

[0076] The assay according to this invention has allowed the identification of the marker polynucleotides, called protein tyrosine kinase biomarkers herein, having expression levels in the cells that are highly correlated with drug sensitivity exhibited by the cells. Such marker polynucleotides encompass the above-listed protein tyrosine kinase-encoding polynucleotides, and serve as useful molecular tools for predicting a response to drugs, compounds, biological agents, chemotherapeutic agents, and the like, preferably those drugs and compounds, and the like, that affect protein tyrosine kinase activity via direct or indirect inhibition or antagonism of the protein tyrosine kinase function or activity.

[0077] In its preferred aspect, the present invention describes polynucleotides that correlate with sensitivity or resistance of prostate cell lines to treatment with a protein tyrosine kinase inhibitor compound, e.g., BMS-A, as described herein. (FIG. 1 and Table 2). The protein tyrosine kinase inhibitor compound, BMS-A, utilized for identifying the polynucleotide predictor sets of this invention, was described in WO 00/62778, published Oct. 26, 2000, and is hereby incorporated by reference in its entirety. BMS-A has potent inhibitory activity for a number of protein tyrosine kinases, for example, members of the Src family of protein tyrosine kinases, including Src, Fgr, Fyn, Yes, Blk, Hck, Lck and Lyn, as well as the Bcr-abl, Jak, PDGFR, c-kit and Eph receptors protein tyrosine kinases. Specifically, for the BMS-A protein tyrosine kinase inhibitor compound analyzed, the expression of 176 predictor polynucleotides was found to correlate with resistance/sensitivity of the prostate cell lines to the compound.

[0078] The term “BMS-A” as used herein refers to a compound having the following structure (I):

[chemical structure]

Compound (I) can also be referred to as N-(2-chloro-6-methylphenyl)-2-[[6-[4-(2-hydroxyethyl)-1-piperazinyl]-2-methyl-4-pyrimidinyl]amino]-5-thiazolecarboxamide or as N-(2-chloro-6-methylphenyl)-2-((6-(4-(2-hydroxyethyl)-1-piperazinyl)-2-methyl-4-pyrimidinyl)amino)-1,3-thiazole-5-carboxamide in accordance with IUPAC nomenclature. Use of the term “N-(2-chloro-6-methylphenyl)-2-[[6-[4-(2-hydroxyethyl)-1-piperazinyl]-2-methyl-4-pyrimidinyl]amino]-5-thiazolecarboxamide” encompasses (unless otherwise indicated) solvates (including hydrates) and polymorphic forms of the compound (I) or its salts (such as the monohydrate form of (I) described in U.S. Ser. No. 11/051,208, filed Feb. 4, 2005, incorporated herein by reference in its entirety and for all purposes). Pharmaceutical compositions of N-(2-chloro-6-methylphenyl)-2-[[6-[4-(2-hydroxyethyl)-1-piperazinyl]-2-methyl-4-pyrimidinyl]amino]-5-thiazolecarboxamide include all pharmaceutically acceptable compositions comprising N-(2-chloro-6-methylphenyl)-2-[[6-[4-(2-hydroxyethyl)-1-piperazinyl]-2-methyl-4-pyrimidinyl]amino]-5-thiazolecarboxamide and one or more diluents, vehicles and/or excipients, such as those compositions described in U.S. Ser. No. 11/402,502, filed Apr. 12, 2006, incorporated herein by reference in its entirety and for all purposes. One example of a pharmaceutical composition comprising N-(2-chloro-6-methylphenyl)-2-[[6-[4-(2-hydroxyethyl)-1-piperazinyl]-2-methyl-4-pyrimidinyl]amino]-5-thiazolecarboxamide is SPRYCEL® (Bristol-Myers Squibb Company). SPRYCEL® comprises N-(2-chloro-6-methylphenyl)-2-[[6-[4-(2-hydroxyethyl)-1-piperazinyl]-2-methyl-4-pyrimidinyl]amino]-5-thiazolecarboxamide as the active ingredient, also referred to as dasatinib, and as inactive ingredients or excipients, lactose monohydrate, microcrystalline cellulose, croscarmellose sodium, hydroxypropyl cellulose, and magnesium stearate in a tablet comprising hypromellose, titanium dioxide, and polyethylene glycol.

[0079] In accordance with the invention, an approach has been discovered in which polynucleotides and combinations of polynucleotides have been identified whose expression pattern, in a subset of cell lines, correlates to and can be used as an in vitro predictor of cellular response to treatment or therapy with one compound, or with a combination or series of compounds, that are known to inhibit or activate the function of a protein, enzyme, or molecule (e.g., a receptor) that is directly or indirectly involved in cell proliferation, cell responses to external stimuli, (such as ligand binding), or signal transduction, e.g., a protein tyrosine kinase. Preferred are antagonists or inhibitors of the function of a given protein, e.g., a tyrosine kinase.

[0080] In a preferred aspect, the BMS-A protein tyrosine kinase inhibitor was employed to determine drug sensitivity in a panel of prostate cell lines following exposure of the cells to this compound. Some of the cell lines were determined to be resistant to treatment with the inhibitor compound, while others were determined to be sensitive to the inhibitor. (Table 1). A subset of the cell lines examined provided an expression pattern or profile of polynucleotides, and combinations of polynucleotides, that correlated to, and thus serve as a predictor of, a response by the cells to the inhibitor compound, and to compounds having similar modes of action and/or structure. (Tables 2, 3, 4-5).

[0081] Such a predictor set of polynucleotide expression patterns correlating with sensitivity or resistance of cells following exposure of the cells to a drug, or a combination of drugs, provides a useful tool for screening a cancer, tumor, or patient test sample before treatment with the drug or a drug combination. The screening technique allows a prediction of cells of a cancer, tumor, or test sample exposed to a drug, or a combination of drugs, based on the polynucleotide expression results of the predictor set, as to whether or not the cancer, tumor, or test sample, and hence a patient harboring the cancer and/or tumor, will or will not respond to treatment with the drug or drug combination. In addition, the predictor polynucleotides or predictor polynucleotide set can also be utilized as described herein for monitoring the progress of disease treatment or therapy in those patients undergoing treatment involving a protein tyrosine kinase, e.g., src tyrosine kinase, inhibitor compound or chemotherapeutic agent for a disease, e.g., prostate cancer.

[0082] According to a particular embodiment of the present invention, oligonucleotide microarrays were utilized to measure the expression levels of over 22,000 probe sets in a panel of 16 untreated prostate cell lines for which the drug sensitivity to the protein tyrosine kinase inhibitor compound was determined. This analysis was performed to determine whether the polynucleotide expression signatures of untreated cells were sufficient for the prediction of chemosensitivity. Data analysis allowed the identification of marker polynucleotides whose expression levels were found to be highly correlated with drug sensitivity. In addition, the treatment of cells with the BMS-A protein tyrosine kinase inhibitor compound also provided polynucleotide expression signatures predictive of sensitivity to the compound. Thus, in one of its embodiments, the present invention provides these polynucleotides, i.e., polynucleotide “markers” or “biomarkers” or “predictors”, which show utility in predicting drug response upon treatment or exposure of cells to a drug. In particular, the marker or predictor polynucleotides are protein tyrosine kinase biomarkers polynucleotides encoding protein tyrosine kinase biomarker proteins/polypeptides, such as a src tyrosine kinase inhibitor biomarker.

[0083] The performance of the polynucleotide expression and marker polynucleotide identification analyses embraced by the present invention is described in further detail and without limitation herein below.

[0084] The present invention provides methods of determining responsiveness of an individual having a BCR-ABL associated disorder to a certain treatment regimen and methods of treating an individual having a BCR-ABL associated disorder.

[0085] The term “BCR-ABL” as used herein is inclusive of both wild-type and mutant BCR-ABL.

[0086] “BCR-ABL associated disorders” are those disorders which result from BCR-ABL activity, including mutant BCR-ABL activity, and/or which are alleviated by the inhibition of BCR-ABL, including mutant BCR-ABL, expression and/or activity. A reciprocal translocation between chromosomes 9 and 22 produces the oncogenic BCR-ABL fusion protein. The phrase “BCR-ABL associated disorders” is inclusive of “mutant BCR-ABL associated disorders”.

[0087] Disorders included in the scope of the present invention include, for example, leukemias, including, for example, chronic myeloid leukemia, acute lymphoblastic leukemia, and Philadelphia chromosome positive acute lymphoblastic leukemia (Ph+ ALL), squamous cell carcinoma, small-cell lung cancer, non-small cell lung cancer, glioma, gastrointestinal cancer, renal cancer, ovarian cancer, liver cancer, colorectal cancer, endometrial cancer, kidney cancer, prostate cancer, thyroid cancer, neuroblastoma, pancreatic cancer, glioblastoma multiforme, cervical cancer, stomach cancer, bladder cancer, hepatoma, breast cancer, colon carcinoma, and head and neck cancer, gastric cancer, germ cell tumor, pediatric sarcoma, sinonasal natural killer, multiple myeloma, acute myelogenous leukemia, chronic lymphocytic leukemia, mastocytosis and any symptom associated with mastocytosis. In addition, disorders include urticaria pigmentosa, mastocytosises such as diffuse cutaneous mastocytosis, solitary mastocytoma in human, as well as dog mastocytoma and some rare subtypes like bullous, erythrodermic and teleangiectatic mastocytosis, mastocytosis with an associated hematological disorder, such as a myeloproliferative or myelodysplastic syndrome, or acute leukemia, myeloproliferative disorder associated with mastocytosis, and mast cell leukemia. Various additional cancers are also included within the scope of protein tyrosine kinase-associated disorders including, for example, the following: carcinoma, including that of the bladder, breast, colon, kidney, liver, lung, ovary, pancreas, stomach, cervix, thyroid, testis, particularly testicular seminomas, and skin; including squamous cell carcinoma; gastrointestinal stromal tumors (“GIST”); hematopoietic tumors of lymphoid lineage, including leukemia, acute lymphocytic leukemia, acute lymphoblastic leukemia, B-cell lymphoma, T-cell lymphoma, Hodgkins lymphoma, non-Hodgkins lymphoma, hairy cell lymphoma and Burketts lymphoma; hematopoietic tumors of myeloid lineage, including acute and chronic myelogenous leukemias and promyelocytic leukemia; tumors of mesenchymal origin, including fibrosarcoma and rhabdomyoscarcoma; other tumors, including melanoma, seminoma, tetratocarcinoma, neuroblastoma and glioma; tumors of the central and peripheral nervous system, including astrocytoma, neuroblastoma, glioma, and schwannomas; tumors of mesenchymal origin, including fibrosarcoma, rhabdomyoscaroma, and osteosarcoma; and other tumors, including melanoma, xenoderma pigmentosum, keratoactanthoma, seminoma, thyroid follicular cancer, teratocarcinoma, chemotherapy refractory non-seminomatous germ-cell tumors, and Kaposi's sarcoma. In certain preferred embodiments, the disorder is leukemia, breast cancer, prostate cancer, lung cancer, colon cancer, melanoma, or solid tumors. In certain preferred embodiments, the leukemia is chronic myeloid leukemia (CML), Ph+ ALL, AML, imatinib-resistant CML, imatinib-intolerant CML, accelerated CML, lymphoid blast phase CML,

[0088] A “solid tumor” includes, for example, sarcoma, melanoma, carcinoma, or other solid tumor cancer.

[0089] The terms “cancer”, “cancerous”, or “malignant” refer to or describe the physiological condition in mammals that is typically characterized by unregulated cell growth. Examples of cancer include, for example, leukemia, lymphoma, blastoma, carcinoma and sarcoma. More particular examples of such cancers include chronic myeloid leukemia, acute lymphoblastic leukemia, Philadelphia chromosome positive acute lymphoblastic leukemia (Ph+ ALL), squamous cell carcinoma, small-cell lung cancer, non-small cell lung cancer, glioma, gastrointestinal cancer, renal cancer, ovarian cancer, liver cancer, colorectal cancer, endometrial cancer, kidney cancer, prostate cancer, thyroid cancer, neuroblastoma, pancreatic cancer, glioblastoma multiforme, cervical cancer, stomach cancer, bladder cancer, hepatoma, breast cancer, colon carcinoma, and head and neck cancer, gastric cancer, germ cell tumor, pediatric sarcoma, sinonasal natural killer, multiple myeloma, acute myelogenous leukemia (AML), and chronic lymphocytic leukemia (CML).

[0090] “Leukemia” refers to progressive, malignant diseases of the blood-forming organs and is generally characterized by a distorted proliferation and development of leukocytes and their precursors in the blood and bone marrow. Leukemia is generally clinically classified on the basis of: (1) the duration and character of the disease—acute or chronic; (2) the type of cell involved; myeloid (myelogenous), lymphoid (lymphogenous), or monocytic; and (3) the increase or non-increase in the number of abnormal cells in the blood—leukemic or aleukemic (subleukemic). Leukemia includes, for example, acute nonlymphocytic leukemia, chronic lymphocytic leukemia, acute granulocytic leukemia, chronic granulocytic leukemia, acute promyelocytic leukemia, adult T-cell leukemia, aleukemic leukemia, a leukocythemic leukemia, basophylic leukemia, blast cell leukemia, bovine leukemia, chronic myelocytic leukemia, leukemia cutis, embryonal leukemia, eosinophilic leukemia, Gross' leukemia, hairy-cell leukemia, hemoblastic leukemia, hemocytoblastic leukemia, histiocytic leukemia, stem cell leukemia, acute monocytic leukemia, leukopenic leukemia, lymphatic leukemia, lymphoblastic leukemia, lymphocytic leukemia, lymphogenous leukemia, lymphoid leukemia, lymphosarcoma cell leukemia, mast cell leukemia, megakaryocytic leukemia, micromyeloblastic leukemia, monocytic leukemia, myeloblastic leukemia, myelocytic leukemia, myeloid granulocytic leukemia, myelomonocytic leukemia, Naegeli leukemia, plasma cell leukemia, plasmacytic leukemia, promyelocytic leukemia, Rieder cell leukemia, Schilling's leukemia, stem cell leukemia, subleukemic leukemia, and undifferentiated cell leukemia. In certain aspects, the present invention provides treatment for chronic myeloid leukemia, acute lymphoblastic leukemia, and/or Philadelphia chromosome positive acute lymphoblastic leukemia (Ph+ ALL).

[0091] The invention encompasses treatment methods based upon the demonstration that patients harboring different BCR-ABL mutations have varying degrees of resistance and/or sensitivity to imatinib and N-(2-chloro-6-methylphenyl)-2-[[6-[4-(2-hydroxyethyl)-1-piperazinyl]-2-methyl-4-pyrimidinyl]amino]-5-thiazolecarboxamide, respectively. Thus the methods of the present invention can be used, for example, in determining whether or not to treat an individual with N-(2-chloro-6-methylphenyl)-2-[[6-[4-(2-hydroxyethyl)-1-piperazinyl]-2-methyl-4-pyrimidinyl]amino]-5-thiazolecarboxamide or a pharmaceutically acceptable salt, hydrate, or solvate thereof; whether or not to treat an individual with a more aggressive dosage regimen of N-(2-chloro-6-methylphenyl)-2-[[6-[4-(2-hydroxyethyl)-1-piperazinyl]-2-methyl-4-pyrimidinyl]amino]-5-thiazolecarboxamide or a pharmaceutically acceptable salt, hydrate, or solvate thereof; or whether or not to treat an individual with combination therapy, i.e., a combination of tyrosine kinase inhibitors, such as N-(2-chloro-6-methylphenyl)-2-[[6-[4-(2-hydroxyethyl)-1-piperazinyl]-2-methyl-4-pyrimidinyl]amino]-5-thiazolecarboxamide or a pharmaceutically acceptable salt, hydrate, or solvate thereof and additional BCR-ABL inhibitors(s) (e.g., such as imatinib, AMN107, PD180970, GGP76030, AP23464, SKI 606, NS-187, and/or AZD0530); a combination of N-(2-chloro-6-methylphenyl)-2-[[6-[4-(2-hydroxyethyl)-1-piperazinyl]-2-methyl-4-pyrimidinyl]amino]-5-thiazolecarboxamide or a pharmaceutically acceptable salt, hydrate, or solvate thereof and a tubulin stabilizing agent (such as, for example, paclitaxol, epothilone, taxane, and the like); a combination of N-(2-chloro-6-methylphenyl)-2-[[6-[4-(2-hydroxyethyl)-1-piperazinyl]-2-methyl-4-pyrimidinyl]amino]-5-thiazolecarboxamide or a pharmaceutically acceptable salt, hydrate, or solvate thereof and a farnysyl transferase inhibitor; a combination of N-(2-chloro-6-methylphenyl)-2-[[6-[4-(2-hydroxyethyl)-1-piperazinyl]-2-methyl-4-pyrimidinyl]amino]-5-thiazolecarboxamide and another protein tyrosine kinase inhibitor; a combination of N-(2-chloro-6-methylphenyl)-2-[[6-[4-(2-hydroxyethyl)-1-piperazinyl]-2-methyl-4-pyrimidinyl]amino]-5-thiazolecarboxamide and ATP non-competitive inhibitors ONO12380; a combination of N-(2-chloro-6-methylphenyl)-2-[[6-[4-(2-hydroxyethyl)-1-piperazinyl]-2-methyl-4-pyrimidinyl]amino]-5-thiazolecarboxamide and Aurora kinase inhibitor VX-680; a combination of N-(2-chloro-6-methylphenyl)-2-[[6-[4-(2-hydroxyethyl)-1-piperazinyl]-2-methyl-4-pyrimidinyl]amino]-5-thiazolecarboxamide and p38 MAP kinase inhibitor BIRB-796; any other combination disclosed herein.

[0092] The terms “treating”, “treatment” and “therapy” as used herein refer to curative therapy, prophylactic therapy, preventative therapy, and mitigating disease therapy.

[0093] In certain embodiments, the present invention provides a method of identifying a whether a patient is predicted to be resistant to inhibition of a protein tryrosine kinase activity, such as BCR-ABL kinase activity by N-(2-chloro-6-methylphenyl)-2-[[6-[4-(2-hydroxyethyl)-1-piperazinyl]-2-methyl-4-pyrimidinyl]amino]-5-thiazolecarboxamide, the method comprising determining the expression level of one or more predictor polynucleotides in a patient or tissue sample, or in a mammalian cell. The mammalian cell can be a human cancer cell. The human cancer cell can be one obtained from an individual treated having a BCR-ABL associated disorder.

[0094] For use herein, a BCR-ABL inhibitor refers to any molecule or compound that can partially inhibit BCR-ABL or mutant BCR-ABL activity or expression. These include inhibitors of the Src family kinases such as BCR/ABL, ABL, c-Src, SRC/ABL, and other forms including, but not limited to, JAK, FAK, FPS, CSK, SYK, and BTK. A series of inhibitors, based on the 2-phenylaminopyrimidine class of pharmacophotes, has been identified that have exceptionally high affinity and specificity for Abl (see, e.g., Zimmerman et al., Bioorg, Med. Chem. Lett., 7:187 (1997)). All of these inhibitors are encompassed within the term a BCR-ABL inhibitor. Imatinib, one of these inhibitors, also known as STI-571 (formerly referred to as Novartis test compound CGP 57148 and also known as GLEEVEC®), has been successfully tested in clinical trail a therapeutic agent for CML. AMN107 is another BCR-ABL kinase inhibitor that was designed to fit into the ATP-binding site of the BCR-ABL protein with higher affinity than imatinib. In addition to being more potent than imatinib (IC₅₀<30 nM) against wild-type BCR-ABL, AMN107 is also significantly active against 32/33 imatinib-resistant BCR-ABL mutants. In preclinical studies, AMN107 demonstrated activity in vitro and in vivo against wild-type and imatinib-resistant BCR-ABL-expressing cells. In phase I/II clinical trials, AMN107 has produced haematological and cytogenetic responses in CML patients, who either did not initially respond to imatinib or developed imatinib resistance (Weisberg et al., British Journal of Cancer, 94:1765-1769 (2006)), incorporated herein by reference in its entirety and for all purposes). SKI-606, NS-187, AZD0530, PD180970, CGP76030, and AP23464 are all examples of kinase inhibitors that can be used in the present invention. SKI-606 is a 4-anilino-3-quinolinecarbonitrile inhibitor of Abl that has demonstrated potent antiproliferative activity against CML cell (Golas et al., Cancer Research, 63:375-381 (2003)). AZD0530 is a dual Abl/Src kinase inhibitor that is in ongoing clinical trials for the treatment of solid tumors and leukemia (Green et al., Preclinical Activity of AZD0530, a novel, oral, potent, and selective inhibitor of the Src family kinases. Poster 3161 presented at the EORTC-NCI-AACR, Geneva Switzerland, 28 Sep. 2004). PD180970 is a pyrido[2,3-d]pyrimidine derivative that has been shown to inhibit BCR-ABL and induce apoptosis in BCR-ABL expressing leukemic cells (Rosee et al., Cancer Research, 62:7149-7153 (2002)). CGP76030 is dual-specific Src and Abl kinase inhibitor shown to inhibit the growth and survival of cells expressing imatinib-resistant BCR-ABL kinases (Warmuth et al., Blood, 101(2):664-672 (2003)). AP23464 is an ATP-based kinase inhibitor that has been shown to inhibit imatinib-resistant BCR-ABL mutants (O′Hare et al., Clin. Cancer Res., 11(19):6987-6993 (2005)). NS-187 is a selective dual Bcr-Abl/Lyn tyrosine kinase inhibitor that has been shown to inhibit imatinib-resistant BCR-ABL mutants (Kimura et al., Blood, 106(12):3948-3954 (2005)).

[0095] Treatment regimens can be established based upon the whether the patient or sample or cell is predicted to be resistant to a protein tyrosine kinase inhibitor, including BMS-A. For example, the invention encompasses screening cells from an individual who may suffer from, or is suffering from, a disorder that is commonly treated with a kinase inhibitor, including a BCR-ABL associated disorder. Such a disorder can include myeloid leukemia or disorders associated therewith, or cancers described herein. The cells of an individual are screened, using methods known in the art, for measuring expression levels of a polynucleotide or polypeptide.

[0096] The term “about” as used herein in referring to increased expression levels of a predictive biomarker polynucleotide and/or polypeptide is meant to refer to either a normal level of expression of the biomarker relative to a standard level, or an expression level that is elevated by at least 0.1, 0.2, 0.3, 0.4, 0.5, 0.6, 0.7, 0.8, 0.9, 1.0, 1.5, 2, 2.5, 3, 3.5, 4, 4.5, 5, 5.5, 6, 6.5, 7, 7.5, 8, 8.5, 9, 9.5, 10 fold, or more higher than a standard level.

[0097] The term “about” as used herein in referring to deceased expression levels of a predictive biomarker polynucleotide and/or polypeptide is meant to refer to an expression level that is decreased by at least 0.1, 0.2, 0.3, 0.4, 0.5, 0.6, 0.7, 0.8, 0.9, 1.0, 1.5, 2, 2.5, 3, 3.5, 4, 4.5, 5, 5.5, 6, 6.5, 7, 7.5, 8, 8.5, 9, 9.5, 10 fold, or more below a standard level.

[0098] If the patient, sample, or cell is predicted to be resistant to a protein tyrosine kinase inhibitor, treatment regimens can be developed appropriately. For example, a decreased expression level of CK5 (KRT5), PLAU and/or EphA2 or elevated expression levels of AR and/or PSA in a sample relative to a standard can indicate that the cells in an individual are or are expected to become at least partially resistant to treatment with a kinase inhibitor such as N-(2-chloro-6-methylphenyl)-2-[[6-[4-(2-hydroxyethyl)-1-piperazinyl]-2-methyl-4-pyrimidinyl]amino]-5-thiazolecarboxamide. As disclosed herein, in such cases, treatment can include the use of an increased dosing frequency or increased dosage of N-(2-chloro-6-methylphenyl)-2-[[6-[4-(2-hydroxyethyl)-1-piperazinyl]-2-methyl-4-pyrimidinyl]amino]-5-thiazolecarboxamide or a salt, hydrate, or solvate thereof, a combination of N-(2-chloro-6-methylphenyl)-2-[[6-[4-(2-hydroxyethyl)-1-piperazinyl]-2-methyl-4-pyrimidinyl]amino]-5-thiazolecarboxamide or a pharmaceutically acceptable salt, hydrate, or solvate thereof and another kinase inhibitor drug such as imatinib, AMN107, PD180970, GGP76030, AP23464, SKI 606, and/or AZD0530; a combination of N-(2-chloro-6-methylphenyl)-2-[[6-[4-(2-hydroxyethyl)-1-piperazinyl]-2-methyl-4-pyrimidinyl]amino]-5-thiazolecarboxamide and a tubulin stabilizing agent (e.g., paclitaxol, epothilone, taxane, etc.); a combination of N-(2-chloro-6-methylphenyl)-2-[[6-[4-(2-hydroxyethyl)-1-piperazinyl]-2-methyl-4-pyrimidinyl]amino]-5-thiazolecarboxamide and a farnysyl transferase inhibitor; any other combination disclosed herein; and any other combination or dosing regimen comprising N-(2-chloro-6-methylphenyl)-2-[[6-[4-(2-hydroxyethyl)-1-piperazinyl]-2-methyl-4-pyrimidinyl]amino]-5-thiazolecarboxamide disclosed herein. In one aspect, an increased level of N-(2-chloro-6-methylphenyl)-2-[[6-[4-(2-hydroxyethyl)-1-piperazinyl]-2-methyl-4-pyrimidinyl]amino]-5-thiazolecarboxamide would be about 10, 20, 30, 40, 50, 60, 70, 80, 90, or 95% more than the typical N-(2-chloro-6-methylphenyl)-2-[[6-[4-(2-hydroxyethyl)-1-piperazinyl]-2-methyl-4-pyrimidinyl]amino]-5-thiazolecarboxamide dose for a particular indication or for individual, or about 1.5×, 2×, 2.5×, 3×, 3.5×, 4×, 4.5×, 5×, 6×, 7×, 8×, 9×, or 10× more N-(2-chloro-6-methylphenyl)-2-[[6-[4-(2-hydroxyethyl)-1-piperazinyl]-2-methyl-4-pyrimidinyl]amino]-5-thiazolecarboxamide than the typical N-(2-chloro-6-methylphenyl)-2-[[6-[4-(2-hydroxyethyl)-1-piperazinyl]-2-methyl-4-pyrimidinyl]amino]-5-thiazolecarboxamide dose for a particular indication or for individual.

[0099] A therapeutically effective amount of N-(2-chloro-6-methylphenyl)-2-[[6-[4-(2-hydroxyethyl)-1-piperazinyl]-2-methyl-4-pyrimidinyl]amino]-5-thiazolecarboxamide or a pharmaceutically acceptable salt, hydrate, or solvate thereof can be orally administered as an acid salt of N-(2-chloro-6-methylphenyl)-2-[[6-[4-(2-hydroxyethyl)-1-piperazinyl]-2-methyl-4-pyrimidinyl]amino]-5-thiazolecarboxamide. The actual dosage employed can be varied depending upon the requirements of the patient and the severity of the condition being treated. Determination of the proper dosage for a particular situation is within the skill of the art. The effective amount of N-(2-chloro-6-methylphenyl)-2-[[6-[4-(2-hydroxyethyl)-1-piperazinyl]-2-methyl-4-pyrimidinyl]amino]-5-thiazolecarboxamide or a pharmaceutically acceptable salt, hydrate, or solvate thereof (and Compound I salt) can be determined by one of ordinary skill in the art, and includes exemplary dosage amounts for an adult human of from about 0.05 to about 100 mg/kg of body weight of N-(2-chloro-6-methylphenyl)-2-[[6-[4-(2-hydroxyethyl)-1-piperazinyl]-2-methyl-4-pyrimidinyl]amino]-5-thiazolecarboxamide or a pharmaceutically acceptable salt, hydrate, or solvate thereof, per day, which can be administered in a single dose or in the form of individual divided doses, such as from 1, 2, 3, or 4 times per day. In certain embodiments, N-(2-chloro-6-methylphenyl)-2-[[6-[4-(2-hydroxyethyl)-1-piperazinyl]-2-methyl-4-pyrimidinyl]amino]-5-thiazolecarboxamide or a pharmaceutically acceptable salt, hydrate, or solvate thereof is administered 2 times per day at 70 mg. Alternatively, it can be dosed at, for example, 50, 70, 90, 100, 110, or 120 BID, or 100, 140, or 180 once daily. It will be understood that the specific dose level and frequency of dosing for any particular subject can be varied and will depend upon a variety of factors including the activity of the specific compound employed, the metabolic stability and length of action of that compound, the species, age, body weight, general health, sex and diet of the subject, the mode and time of administration, rate of excretion, drug combination, and severity of the particular condition. Preferred subjects for treatment include animals, most preferably mammalian species such as humans, and domestic animals such as dogs, cats, and the like, subject to protein tyrosine kinase-associated disorders. The same also applies to Compound II or any combination of Compound I and II, or any combination disclosed herein.

[0100] A method of determining the responsiveness of an individual suffering from a protein tyrosine kinase-associated disorder to a combination of kinase inhibitors, such as N-(2-chloro-6-methylphenyl)-2-[[6-[4-(2-hydroxyethyl)-1-piperazinyl]-2-methyl-4-pyrimidinyl]amino]-5-thiazolecarboxamide and imatinib, is disclosed herein. For example, an individual can be determined to be a positive responder (or cells from said individual would be expected to have a degree of sensitivity) to a certain kinase inhibitor based upon the presence of a mutant BCR-ABL kinase. As disclosed herein, cells exhibiting decreased expression level of CK5 (KRT5), PLAU and/or EphA2 or elevated expression levels of AR and/or PSA in a sample relative to a standard, can develop at least partial resistance to of N-(2-chloro-6-methylphenyl)-2-[[6-[4-(2-hydroxyethyl)-1-piperazinyl]-2-methyl-4-pyrimidinyl]amino]-5-thiazolecarboxamide or a pharmaceutically acceptable salt, hydrate, or solvate thereof. Therefore, individuals suffering from a protein tyrosine kinase-associated disorder whose cells exhibit such a profile, among others disclosed herein, are or would be expected to be partially negative responders to a particular treatment regimen with N-(2-chloro-6-methylphenyl)-2-[[6-[4-(2-hydroxyethyl)-1-piperazinyl]-2-methyl-4-pyrimidinyl]amino]-5-thiazolecarboxamide or a pharmaceutically acceptable salt, hydrate, or solvate thereof but a positive responder to a more aggressive treatment regimen of N-(2-chloro-6-methylphenyl)-2-[[6-[4-(2-hydroxyethyl)-1-piperazinyl]-2-methyl-4-pyrimidinyl]amino]-5-thiazolecarboxamide or a pharmaceutically acceptable salt, hydrate, or solvate thereof or to combination therapy with N-(2-chloro-6-methylphenyl)-2-[[6-[4-(2-hydroxyethyl)-1-piperazinyl]-2-methyl-4-pyrimidinyl]amino]-5-thiazolecarboxamide or a pharmaceutically acceptable salt, hydrate, or solvate thereof and imatinib or other therapy.

[0101] A treatment regimen is a course of therapy administered to an individual suffering from a protein kinase associated disorder that can include treatment with one or more kinase inhibitors, as well as other therapies such as radiation and/or other agents (i.e., combination therapy). When more than one therapy is administered, the therapies can be administered concurrently or consecutively (for example, more than one kinase inhibitor can be administered together or at different times, on a different schedule). Administration of more than one therapy can be at different times (i.e., consecutively) and still be part of the same treatment regimen. As disclosed herein, for example, cells from an individual suffering from a protein kinase associated disorder can be found to develop at least partial resistance to N-(2-chloro-6-methylphenyl)-2-[[6-[4-(2-hydroxyethyl)-1-piperazinyl]-2-methyl-4-pyrimidinyl]amino]-5-thiazolecarboxamide. Based upon the present discovery that such cells can be sensitive to combination therapy or a more aggressive dosage or dosing regimen of N-(2-chloro-6-methylphenyl)-2-[[6-[4-(2-hydroxyethyl)-1-piperazinyl]-2-methyl-4-pyrimidinyl]amino]-5-thiazolecarboxamide or a pharmaceutically acceptable salt, hydrate, or solvate thereof, a treatment regimen can be established that includes treatment with the combination either as a monotherapy, or in combination with another kinase inhibitor, or in combination with another agent as disclosed herein. Additionally, the combination can be administered with radiation or other known treatments.

[0102] Therefore the present invention includes a method for establishing a treatment regimen for an individual suffering from a protein tyrosine kinase associated disorder or treating an individual suffering from a protein tyrosine kinase disorder comprising determining whether a biological sample obtained from an individual is predicted to be resistant to a protein tyrosine kinase inhibitor, including BMS-A, and administering to the subject an appropriate treatment regimen based on whether the mutation is present. The determination can be made by any method known in the art, for example, by measuring the expression level of at least one predictor polynucleotide or polypeptide of the present invention.

[0103] In practicing the many aspects of the invention herein, biological samples can be selected from many sources such as tissue biopsy (including cell sample or cells cultured therefrom; biopsy of bone marrow or solid tissue, for example cells from a solid tumor), blood, blood cells (red blood cells or white blood cells), serum, plasma, lymph, ascetic fluid, cystic fluid, urine, sputum, stool, saliva, bronchial aspirate, CSF or hair. Cells from a sample can be used, or a lysate of a cell sample can be used. In certain embodiments, the biological sample is a tissue biopsy cell sample or cells cultured therefrom, for example, cells removed from a solid tumor or a lysate of the cell sample. In certain embodiments, the biological sample comprises blood cells.

[0104] Pharmaceutical compositions for use in the present invention can include compositions comprising one or a combination of inhibitors of a BCR-ABL kinase in an effective amount to achieve the intended purpose. The determination of an effective dose of a pharmaceutical composition of the invention is well within the capability of those skilled in the art. A therapeutically effective dose refers to that amount of active ingredient which ameliorates the symptoms or condition. Therapeutic efficacy and toxicity can be determined by standard pharmaceutical procedures in cell cultures or experimental animals, for example the ED50 (the dose therapeutically effective in 50% of the population) and LD50 (the dose lethal to 50% of the population).

[0105] Dosage regimens involving N-(2-chloro-6-methylphenyl)-2-[[6-[4-(2-hydroxyethyl)-1-piperazinyl]-2-methyl-4-pyrimidinyl]amino]-5-thiazolecarboxamide useful in practicing the present invention are described in U.S. Ser. No. 10/395,503, filed Mar. 24, 2003; and Blood (ASH Annual Meeting Abstracts) (2004) Volume 104: Abstract 20, “Hematologic and Cytogenetic Responses in imatinib-Resistant Accelerated and Blast Phase Chronic Myeloid Leukemia (CML) Patients Treated with the Dual SRC/ABL Kinase Inhibitor N-(2-chloro-6-methylphenyl)-2-[[6-[4-(2-hydroxyethyl)-1-piperazinyl]-2-methyl-4-pyrimidinyl]amino]-5-thiazolecarboxamide: Results from a Phase I Dose Escalation Study.”, by Moshe Talpaz, et al; which are hereby incorporated herein by reference in their entirety and for all purposes.

[0106] A “therapeutically effective amount” of an inhibitor of a BCR-ABL kinase can be a function of whether the patient, sample, or cell is predicted to be resistant to a protein tyrosine kinase inhibitor. For example, if a patient, sample, or cell is predicted to be resistant to a protein tyrosine kinase inhibitor, then an elevated dosage of said protein tyrosine kinase inhibitor may be warranted, or a more aggressive dosing regimen such as increased dosing frequency, or administration of a combination of said protein tyrosine kinase inhibitor with another agent described herein, or any combination of an elevated dose, increased dosing frequency, and/or combination with another agent may be warranted. One skilled in the art will appreciate the difference in sensitivity of the BCR-ABL kinase cells and determine a therapeutically effective dose accordingly.

[0107] Examples of predicted therapeutically effective doses of N-(2-chloro-6-methylphenyl)-2-[[6-[4-(2-hydroxyethyl)-1-piperazinyl]-2-methyl-4-pyrimidinyl]amino]-5-thiazolecarboxamide that may be warranted based upon the relative sensitivity of BCR-ABL kinase to N-(2-chloro-6-methylphenyl)-2-[[6-[4-(2-hydroxyethyl)-1-piperazinyl]-2-methyl-4-pyrimidinyl]amino]-5-thiazolecarboxamide compared to wild-type BCR-ABL kinase can be determined using various in vitro biochemical assays including expression profiling, cellular proliferation, BCR-ABL tyrosine phosphorylation, peptide substrate phosphorylation, and/or autophosphorylation assays. For example, approximate therapeutically effective doses of N-(2-chloro-6-methylphenyl)-2-[[6-[4-(2-hydroxyethyl)-1-piperazinyl]-2-methyl-4-pyrimidinyl]amino]-5-thiazolecarboxamide can be calculated based upon multiplying the typical dose with the fold change in sensitivity of the patient sample with said protein tyrosine kinase inhibitor in anyone or more of these assays. For example, if a sample is found to be 2 fold more resistant than a sensitive cell or tissue sample, then the administration of an about 2 fold higher level of said protein tyrosine kinase may be warranted. Accordingly, therapeutically relevant doses of N-(2-chloro-6-methylphenyl)-2-[[6-[4-(2-hydroxyethyl)-1-piperazinyl]-2-methyl-4-pyrimidinyl]amino]-5-thiazolecarboxamide for any sample found to be at least partially resistant to a protein tyrosine kinase inhibitor can be, for example, 1, 2, 3, 4, 5, 6, 7, 8, 9, 10, 11, 12, 13, 14, 15, 16, 17, 18, 19, 20, 25, 30, 35, 40, 50, 60, 70, 80, 90, 100, 125, 150, 175, 200, 225, 250, or 300 folder higher than the prescribed or typical dose. Alternatively, therapeutically relevant doses of N-(2-chloro-6-methylphenyl)-2-[[6-[4-(2-hydroxyethyl)-1-piperazinyl]-2-methyl-4-pyrimidinyl]amino]-5-thiazolecarboxamide can be, for example, 0.9×, 0.8×, 0.7×, 0.6×, 0.5×, 0.4×, 0.3×, 0.2×, 0.1×, 0.09×, 0.08×, 0.07×, 0.06×, 0.05×, 0.04×, 0.03×, 0.02×, or 0.01× of the prescribed dose.

[0108] According to the present invention, dosage regimens are adjusted to provide the optimum desired response (e.g., a therapeutic response). For example, a single bolus can be administered, several divided doses can be administered over time or the dose can be proportionally reduced or increased as indicated by the exigencies of the therapeutic situation. Actual dosage levels of the active ingredients in the pharmaceutical compositions of the present invention can be varied so as to obtain an amount of the active ingredient which is effective to achieve the desired therapeutic response for a particular patient, composition, and mode of administration, without being toxic to the patient. The selected dosage level depends upon a variety of pharmacokinetic factors including the activity of the particular compositions of the present invention employed, or the ester, salt or amide thereof, the route of administration, the time of administration, the rate of excretion of the particular compound being employed, the duration of the treatment, other drugs, compounds and/or materials used in combination with the particular compositions employed, the age, sex, weight, condition, general health and prior medical history of the patient being treated, and like factors. See, e.g., the latest Remington's (Remington's Pharmaceutical Science, Mack Publishing Company, Easton, Pa.)

Identification of Markers Correlated with BMS-A Sensitivity

[0109] In this study we aimed to identify both predictive and surrogate biomarkers that could potentially assist clinical development of BMS-A in prostate cancer. As outlined in FIG. 1A, our strategy was first to identify genes whose baseline expression levels correlated with drug sensitivity and passed additional variation requirements to obtain the candidate predictive marker list. Then genes whose expression were modulated by BMS-A in a drug treatment study were identified and compared to the candidate predictive biomarker list to obtain list of genes that were not only associated with drug sensitivity but also modulated by drug treatment.

[0110] The IC₅₀ values of 16 prostate cell lines to BMS-A were determined and shown in FIG. 1B. Based on the IC₅₀s, cell lines were classified into two groups: 11 cell lines with IC₅₀ lower than 200 nM were designated as sensitive group, and 5 cell lines with IC₅₀ at least greater than 2 μM were considered as resistant group. The separation of these two groups was quite well, and the sensitive/resistant demarcation of 200 nM is within the peak range of BMS-A plasma concentrations in patients treated with the doses near the maximum tolerated dose.

[0111] The baseline gene expression of the 16 cell lines were profiled using AFFYMETRIX® gene chips. Two statistical tests (1-way ANOVA and correlation to log₂IC₅₀ values) were performed to identify genes that were differentially expressed between sensitive and resistant groups (5961 probe sets with p<0.05) and those that were highly correlated with IC₅₀ (4575 probe sets with p<0.05), respectively. A total of 4248 probe sets were overlapped in these two analyses suggesting that the categorization of sensitive and resistant groups reflected well the sensitivity of the cells (IC₅₀) to BMS-A. The list was further filtered with requirement of 10% CV across all samples and minimum 3-fold differential expression between the sensitive and resistant groups, resulting selection of 213 probe sets. Expressed sequence tags (EST) and duplicate probe sets were further removed to generate the candidate predictive marker list of 174 genes (Table 2).

[0112] The expression pattern of the 174 genes on the 16 cell lines was visualized by Cluster analysis. As shown in FIG. 1C, these 16 cell lines were separated into two major groups, with the BMS-A-sensitive cell lines highlighted. Interestingly, the cell lines in the left cluster were all sensitive to BMS-A; within the right cluster, albeit clustered relatively close to the resistant cell lines, DU145, PC3 and LNCaP cells were also highly sensitive to BMS-A. DU145 and PC3 may further represented a smaller subgroup that was distinct from the rest of cells in the right cluster. Of the 174 genes, ˜70% ( 124/174) were expressed higher in sensitive cells lines than in resistant cell line, and ˜30% ( 50/174) of genes were expressed higher in resistant cells.

[0113] There are a number of interesting genes in Table 2. For example, amphiregulin and epiregulin, are components in the EGF-EGFR pathway; TGFα, TGFβ2 and TGFβRII are transforming growth factor pathway genes; and other receptor tyrosine kinases such as met proto-oncogene and fibroblast growth factor receptor 2. These genes were expressed higher in sensitive cell lines. Most strikingly, several important prostatic cell markers such as kallikrein 3 (KLK3 or prostate specific antigen, PSA) and androgen receptor (AR) were over-expressed in the resistant cell lines, while cytokeratin 5 (CK5/KRT5) was highly expressed in the sensitive cell lines as marked in FIG. 1C.

[0114] The relative expression level of CK5, PSA and AR in these 16 cell lines were further shown in FIG. 1D. It is clear that resistant cell lines all expressed very low level of CK5 and sensitive cell lines all expressed high level of CK5 except for DU145, PC3 and LNCaP cells (see FIG. 1C). As CK5 is a marker of basal cell type for the prostatic cell lineage, this data suggests that cells exhibiting the basal phenotype are sensitive to BMS-A and that cells expressing lower level of CK5 tend to be resistant. The expression pattern of PSA and AR, two luminal cell markers, complimentarily reinforces the above observation. While higher expression of PSA and AR correlated with drug resistance, low expression of these two genes highly correlated with BMS-A sensitivity. LNCaP cell line, which was sensitive to BMS-A and expressed high levels of PSA and AR, is the only exception to this observation.

Identification of Markers that are Also Modulated by BMS-A Treatment

[0115] Five BMS-A-sensitive cell lines including two CK5-expressing, PWR1E and RWPE2, and three CK5-nonexpressing cell lines, PC3, DU145 and LNCaP were treated with BMS-A. Comparison of the gene expression profiles between BMS-A-treated and mock-treated same cell line by paired t-test revealed that 1628 probe sets were significantly modulated by drug treatment (p<0.05). Comparison of these 1628 probe sets with the list of candidate predictive markers (Table 2) indicated that 10 genes were common on both lists. These 10 genes, which may be potentially used to predict sensitivity to BMS-A and to serve as surrogates for drug response, are indicated as “decreased” in the third column of Table 2. Interestingly, all these 10 genes were highly expressed in sensitive cell lines and decreased in expression after BMS-A treatment. These genes include epiregulin, a component in the EGF-EGFR pathway, FHL2 and AXL kinases, and plasminogen activator urokinase (PLAU). Three of these 10 genes including LAMC2, EREG and PLAU encode proteins that are secreted to the extracellular matrix. This set of genes may represent genes whose expression are under the regulation of genes targeted by BMS-A.

### Common Biomarkers Identified in Prostate and Breast Preclinical Studies

[0116] To facilitate clinical development of BMS-A for breast cancer, a similar preclinical biomarker study was performed in this laboratory (5). Biomarkers predictive of BMS-A sensitivity in breast cell lines were identified and are currently being assessed in clinical trials. Since the majority of breast tumors are also epithelial origin, we compared the biomarkers discovered in current prostate cancer study with those identified in the breast cancer study. To this end, in addition to those 174 genes aforementioned, we also included probe sets in the list of 1475 probe sets (after the 10% CV step, but before fold-change >3 filter step) that were also significantly modulated by BMS-A, i.e., present on the list of 1628 probes, as candidate prostate biomarkers and compared them to the breast cancer biomarker list of 161 genes (5). Fourteen genes were identified as common biomarkers for both tissue types (Table 3). Notably, EphA2, one of BMS-A targets, was significantly correlated with BMS-A sensitivity in both prostate and breast cancer cell lines. As shown in Table 3, the mean expression of EphA2 was significantly higher in sensitive cell lines than in resistant cell lines (2.69 fold with p=0.005 in t-test).

[0117] As shown in FIG. 2A, the expression level of EphA2, as detected by microarray baseline profiling, was correlated with the IC₅₀ values of the prostate cell lines (higher EphA2 expression with lower IC₅₀ or high sensitivity, Pearson correlation coefficient=−0.66). As a validation, we also performed Western blot analysis to examine the expression of EphA2 protein in 5 sensitive and 3 resistant cell lines (FIG. 2B). Overall, cell lines with high level of EphA2 mRNA expressed relatively high levels of EphA2 protein, indicating good concordance between gene and protein expression for EphA2. Our Western blot results on EphA2 protein in PC3, DU145 and LNCaP cells are consistent with a previous report (15). With the correlation of its expression with BMS-A sensitivity in cell lines, and being a target of the drug, EphA2 appeared as a strong candidate biomarker for BMS-A in prostate cancer.

### Down-Regulation of uPA Expression by BMS-A

[0118] Since PLAU gene codes for a secreted protein uPA that is under the regulation of Src (16), we further evaluated the expression of PLAU gene and its modulation by BMS-A. As shown in FIG. 3A (and also Table 2), the expression level of the PLAU gene in sensitive cell lines was significantly higher than in resistant cell lines. A second probe set for the PLAU gene also showed a similar expression pattern. Additionally, 3 probe sets of PLAU receptor, which partners with PLAU in its function, all showed a similar expression pattern as PLAU in these cell lines (data not shown). These, together with the correlation of PLAU expression with BMS-A sensitivity in breast cancer cell lines (5), suggest strongly that PLAU expression, and potentially the regulation of its function correlate highly with the sensitivity of cells to BMS-A.

[0119] The down-regulation of PLAU mRNA expression by dasatinib was observed (FIG. 3B). Compared to the relatively mild reduction of PLAU expression in two CK5-expressing cells (PWR1E and RWPE2), the reduction in PC3 and DU145 cells were much stronger (approximately 50%). LNCaP cells, which expressed a much lower level of PLAU, also showed a reduction. When we extended the same drug treatment study in additional three resistant cell lines, 22Rv, VCaP and MDAPCa2b, interestingly as shown in FIG. 3C, the magnitude of PLAU reduction by BMS-A was correlated nicely with the sensitivity of cells to BMS-A (r=0.72) with the highest reduction seen in the most sensitive cell line. This suggests PLAU as a potential surrogate biomarker for the biological effect of BMS-A. Furthermore, in a multiple-dose treatment study with PC3 cells, we found that the reduction of PLAU mRNA level by dasatinib at 4 h was minimal for all doses compared to untreated control, but the changes were dramatic at 24 h in a dose-dependent fashion (FIG. 3D).

[0120] The down-regulation of PLAU expression by BMS-A was also seen at the protein level. By an ELISA assay, we found in a time course experiment that amount of uPA protein secreted by PC3 cells into the growth medium was reduced by BMS-A treatment, and the extent of reduction in secreted uPA protein level is dose-dependent as shown in FIG. 3E using the data at 24 h. As a control, when using a cytotoxic agent, TAXOL®, we did not see a dose-dependent reduction in secreted uPA protein level, suggesting that BMS-A specifically down-regulates PLAU expression.

### Rationale for Patient Stratification in BMS-A Prostate Cancer Trials

[0121] Based on their differential expression, we reasoned that CK5, PSA, AR could serve as predictive biomarkers for identification of subtypes of prostate cancer cells or tumors that would respond to BMS-A. We also reasoned that PLAU and EphA2 could potentially be used as surrogate markers to monitor BMS-A response because of their correlation with drug sensitivity and link with the mechanisms of drug action. The expression pattern of these 5 genes in the 16 cell lines was shown in FIG. 4A. Five BMS-A resistant cell lines WPMY1, MDAPCa2b, 22Rv, VCaP, and DUCaP all expressed high levels of AR, PSA and low levels of CK5 (KRT5), PLAU and EphA2. In contrast, sensitive cell lines expressed low levels of AR and PSA, with exception of LNCaP, and high levels of PLAU, EphA2 and/or CK5.

[0122] The dynamic range in expression of these 5 genes and the approximate patient population exhibiting BMS-A-responsive expression pattern were examined using a previously published prostate tumor data set consisting of 52 tumor samples (17). As shown by the cluster analysis in FIG. 4B, nearly 44% ( 23/52, sample ID labeled in red) of the patient population showed the BMS-A-responsive expression patterns, i.e., low AR and PSA and high PLAU, EphA2 and/or CK5. In the remaining ˜56% of patients, the expression of AR and PSA were concordantly relatively high and the expression of PLAU and EphA2 were relatively low. There was certain degrees of co-expression as well as mutual exclusive expression of AR and CK5 in this data set, reminiscent of the expression pattern of these two genes in basal, intermediate and luminal cells of normal prostatic epithelium (18, 19). Co-expression of AR and CK5 may also be alternatively explained as a result of presence of both types of epithelial cells, normal or diseased, in the samples collected, reflecting the heterogeneity of prostate tumors and/or samples. Our data suggest that the five biomarkers identified from preclinical models could help identify patient populations based on expression pattern. Such a gene expression pattern could potentially be used for patient stratification in clinical trials.

### Discussion

[0123] The ideal scenario for identifying biomarkers for a drug under clinical development is to use samples obtained from patients undergoing the particular therapy and to analyze gene expression data in the context of patient response data. Since BMS-A is a novel agent during early development, using preclinical models to identify potential biomarkers for assisting clinical development appears the best option. In this study, we used 16 prostate cell lines to identify biomarkers that were correlated with the sensitivity of cells and with the mechanisms of drug action. These biomarkers could potentially be used for predicting and monitoring BMS-A response. In particular, we identified 5 genes including AR, PSA, CK5, PLAU and EphA2 that were highly associated with drug sensitivity/resistance and/or modulated by drug treatment. Consistent with breast cancer, it appeared in prostate cancer expressing low levels of AR and PSA and high level of CK5 or with a basal type of gene expression pattern is associated with BMS-A response. Higher expression levels of PLAU and EphA2 may also help to define the potential responders to BMS-A. In addition, PLAU expression was found specifically regulated by BMS-A and such regulation was highly correlated with the sensitivity of cells to BMS-A, suggesting that PLAU expression can potentially be used as a surrogate marker to follow drug action.

[0124] In our data analysis, we used an approach that emphasized both statistical significance and high-fold differential gene expression between subgroups. Since we have only 16 cell lines, a pool which may not be necessarily big enough for stringent p value cutoff in statistical analyses, we included other requirements including stringent filters of 10% coefficient of variation and greater than 3-fold changes in expression between two groups. Notably, the approach we undertook was essentially consistent with the one reported by a recent publication from the MicroArray Quality Control initiative led by the Food and Drug Administration, which showed that gene lists ranked by fold change and filtered with non-stringent yet statistical significant tests were more reproducible across platforms than lists generated with other analytical strategies (20). The result we obtained was biologically meaningful as we identified subtypes of cells sensitive to BMS-A that reflects normal and/or pathogenic prostatic biology and genes that reflect the function of BMS-A targets. In addition, a number of biomarkers identified were also observed from breast cancer study (7).

[0125] Inside normal prostatic epithelium, there exist two major types of epithelial cells, basal and luminal epithelial cells. Studies from recent years suggest that there may be further divisions of epithelial cells into subtypes that are more specialized in function and may fall at different stages of cell differentiation process. Among these subtypes are prostatic stem cells, transit amplifying cells, intermediate cells and secretary luminal cells which can be differentiated based on their expression pattern of certain cellular marker. In our study, we found that cells with low AR, PSA expression and high CK5 expression represent a sub-population that is sensitive to BMS-A. This expression pattern coincides with those possessed by epithelial cells residing in the basal compartment which can potentially be prostatic stem cells and transit amplifying cells. Since these two types of cells are able to self-renew and quickly proliferate to give rise to new or more differentiated cells, such a coincidence may suggest an intrinsic relationship between the expression and function of BMS-A targets including Src and other Src family members such as LYN and the proliferation of these cells (8). Indeed, LYN is found expressed higher in basal layer than in luminal layer, and that in tumors LYN tends to be higher in less differentiated regions as well (21).

[0126] In contrast to the well established and validated classification of breast cancer subtypes that have been used in clinic to aid patient stratification (22, 23), molecular classification of prostate cancer using genome-wide profiling techniques has been explored (24) but lacks validation with independent tumor cohorts. This may be certainly caused in part by the heterogeneity of prostate tumors and difficulty to obtain biopsies from prostate cancer patients. It remained to be determined whether the molecular subtypes of prostate cancer identified mimic the epithelial subtypes seen in normal prostatic epithelium, to a degree like those seen in breast cancer (22, 23). From our analysis of the data set published by Singh et al. (17), subtypes that expressed lower level of AR, PSA and higher level of CK5, i.e., mimicking basal type, and that with opposite expression patterns, i.e., mimicking luminal type, apparently exist. The derivation of prostate cancer cell lines such as MDAPCa2b, VCaP, DUCaP and LNCaP also demonstrates clearly the existence of luminal type of prostate cancer. The low expression levels PSA/AR as well as CK5 in PC3 and DU145 may also suggest subtypes other than luminal and basal subtypes. It is noted that the subtype with high expression of CK5 and low expression of AR and PSA seen in our study are mainly based on immortalized prostatic cell lines. However a recent study showed that sub-cell populations with varying degree of differentiation co-exist in both AR-expressing LAPC-4/LAPC-9 human cancer xenograft models and PC3 or DU145 cancer cell populations. The sub-population that expressed CD44, another basal cell marker (25), showed the highest tumorigenicity (26). These strongly suggest that a subtype of cells with the phenotypes of normal basal cells exists in prostate tumors and may contribute a major role in determining the malignancy of tumors. With more tumors samples being profiled, ideally on the same platform, and advancement of techniques that could improve sample acquisition, processing and/or signal amplification, the molecular subtype classification for prostate tumors will become better understood and may eventually facilitate the delivery of personalized medicine to patients.

[0127] We found in our study that LNCaP cells, an androgen-sensitive prostate cancer cell line, exhibited a sensitivity to BMS-A distinct from other androgen-sensitive cell lines including 22Rv, MDAPCa2b, VCaP and DuCaP. Transcriptionally these 5 cell lines resemble each other in terms of expression of AR/PSA, those of 174 genes identified, as well as global gene expression (FIG. 1C and other data not shown). It is not clear what mechanism developed in LNCaP cells causes BMS-A susceptibility. The AR gene mutation may be an appealing but not necessarily a straight-forward one as LNCaP cells possess one T877A mutation and other cells either have no mutation (VCaP and DuCaP) or have other (22Rv, H874Y) or additional types of mutations (MDAPCa2b, L701H and T877A) (27). Alteration in expression or sequence of AR may affect the function of AR in terms of binding to androgen (28) or cross-talk with growth factor and receptor pathways such as phosphorylation of AR by signaling cascades (29). The inhibition of growth factor and receptor pathways by BMS-A may also induce the cells to re-establish the balance of signaling networks and modify the mode of action of AR. It is also possible that the function of one or more targets of BMS-A is indispensable for LNCaP cell growth.

[0128] By identifying genes whose expression were altered by drug treatment, we found a set of genes that may correlate with the mechanisms of action of BMS-A. This is desirable in drug development in two ways. First, although concordance among different gene expression-based predictors have been confirmed in the setting of breast cancer (30), markers correlated with mechanisms of action would enhance the level of confidence when biomarkers are used in clinical testing for the specific drug. Secondly, knowledge of drug efficacy through sensitive molecular testing can help to prevent premature discontinuation of clinical studies due to low pathological responses in early stage trials with small number of patients. In particular, while BMS-A is potent in inhibiting cell adhesion, migration and invasion, it appears to be cytostatic rather than cytotoxic. Thus sensitive surrogate markers become critical for evaluation of drug efficacy in early trials. In our study, we found that uPA, a down-stream target of Src kinase, was modulated significantly by BMS-A, and such down-regulation was specifically caused by BMS-A and not by other cytotoxic agent such as TAXOL®. In addition, the magnitude of drug-induced uPA reduction correlated very well with the sensitivity of cell lines to BMS-A with higher reduction observed in sensitive cell lines and little or no change in resistant ones. These data suggest that uPA could potentially be used as a surrogate biomarker for monitoring the effect of BMS-A. More excitingly, uPA has been demonstrated to play an important role in prostatic tumorigenesis in numerous studies. For example, it is highly expressed in high grade prostate tumors and metastases (31), and when tumor progresses to androgen independence, the level of uPA expression was enhanced (32). In clinic, elevated uPA or uPA receptor densities are shown to be correlated with poorer survival in prostate cancer (33) and its value as a prognostic marker has been well established in breast cancer (34, 35).

[0129] BMS-A is a potent inhibitor against several cytosolic or receptor tyrosine kinases. Its role in inhibiting Src kinase in prostate cancer cell lines through inhibiting cell adhesion, migration and invasion via the focal adhesion kinase pathway has been reported (36). Interestingly, EphA2, an additional target of BMS-A with an enzymatic IC₅₀ at nanomolar range (5), has also been associated with prostate cancer progression (15). In addition to its correlation with sensitivity of cell lines to BMS-A, EphA2 is also down-regulated by BMS-A in prostate cells (data not shown) and in breast cancer cell lines (5). Furthermore, EphA2 may also act in down-stream of Src kinase, as siRNA knock-down of Src reduces EphA2 expression (5). The exact role of EphA2 in prostatic tumorigenesis and the contribution of inhibited EphA2 activity to BMS-A-induced cell growth inhibition remained to be further determined.

[0130] Among the candidate predictive biomarker gene list, a number of genes are components of signaling pathways important for cell survival and proliferation, such as EGF-EGFR, TGF-TGFR, FGFR and Met pathways. As an intracellular tyrosine kinase, Src can act as a signal transducer in down-stream of these receptor tyrosine kinases (8, 9, 37). Alternatively, Src kinase may function independently of one or more pathways. Although the mechanisms of either co-operation or cross-talk of these pathways with Src-mediated pathway in prostate cancer is not quite clear, they may still represent candidate target pathway for combination therapies to achieve additive or synergistic effects. This hypothesis should be tested and may provide insight for future clinical development strategies.

### Utility of Highly Correlated Polynucleotides to Make Predictions

[0131] Polynucleotides that correlate to a specific property of a biological system can be used to make predictions about that biological system and other biological systems. The Genecluster software or other programs can be used to select polynucleotides and combinations of polynucleotides that can predict properties using a “weighted-voting cross-validation algorithm” (T. R. Golub et al., Science, 286:531-537 (1999)). In particular, the Genecluster software was used to build predictors that demonstrate the utility of polynucleotides that correlate to drug sensitivity and resistance. As used herein, the terms “predictor” or “predictor sets” are used as follows: a predictor or a predictor set refers to a single gene, or combination of polynucleotides, whose expression pattern or properties can be used to make predictions, with different error rates, about a property or characteristic of any given biological system.

[0132] The ability of polynucleotide expression patterns to predict a resistance/sensitive classification was further investigated using a “weighted-voting cross-validation algorithm” which uses a leave one out cross-validation strategy as described by T. R. Golub et al., Science, 286:531-537 (1999). The program was formatted to select the optimal number of polynucleotides whose expression pattern could be used to predict, with optimal accuracy, the classification of a cell line based on resistance or sensitivity toward a given protein tyrosine kinase inhibitor compound, e.g., BMS-A. A brief description of the cross-validation strategy of the program is described.

[0133] Thus, in accordance with the present invention, an approach has been developed in which polynucleotides and combinations of polynucleotides have been discovered whose expression pattern in a subset of cell lines correlates with, and can be used as a predictor of, response to treatment with compounds that inhibit the function of protein tyrosine kinases.

### Predictor Sets, Error Rates and Algorithms Used to Demonstrate Utility

[0134] The number of polynucleotides in any given predictor or predictor set may influence the error rate of the predictor set in cross validation experiments and with other mathematical algorithms. The data show that the error rate of a predictor is somewhat dependent on the number of polynucleotides in the predictor set and the contribution of each individual polynucleotide in the given predictor set and the number of cell lines that are tested in the cross validation experiment. For example, in a given predictor set, one polynucleotide may contribute more significantly than other polynucleotides to the prediction.

[0135] It is very likely that if a polynucleotide significantly contributes to a predictor set, then it can be used in different combinations with other polynucleotides to achieve different error rates in different predictor sets. For example, polynucleotide A alone gives an error rate of 30%. In combination with polynucleotides, B, C and D, the error rate becomes 10%; in combination with polynucleotides B, D and E, the error rate becomes 12%; while a combination of polynucleotide A with polynucleotides E-X gives an error rate of 8%, and so on. As demonstrated in FIG. 5, different selection and combination of polynucleotides in a predictor set achieve different error rates in the cross-validation tests.

### Utility of Predictor Sets to Make Predictions on Testing Data of Same Tissue Type

[0136] As described herein, 176 polynucleotides (listed in Table 2) were demonstrated to have their expression levels correlated with sensitivity to a protein tyrosine kinase inhibitor, BMS-A in 16 prostate cancer cell lines. The ability of these 176 polynucleotides, either individually, in combination with one or more, or a represented by polynucleotide subsets to make sensitivity and/or resistance predictions of cell lines to BMS-A was then evaluated in test samples that were different than the test samples used to identify these polynucleotides. Such test samples were utilized to further demonstrate the ability of these 176 polynucleotides, to any combination of one or more of these polynucleotides, and/or a predictor polynucleotide subset, to accurately predict the sensitivity or resistance of a particular test line to BMS-A.

[0137] Based on biological function of the markers shown in Table 2 in relation to protein tyrosine kinases, especially src-family kinase related signaling pathways, and based on changes of their expression level modulated by BMS-A treatment, five polynucleotides as listed in Table 5 were selected to comprise a polynucleotide predictor set that was then utilized to make sensitivity predictions on prostate cell line test samples.

### Utility of Polynucleotide Predictor Sets to Make Predictions on Testing Data of Different Tissue Type

[0138] As described herein, the polynucleotides listed in Table 2 were identified from prostate cancer cell lines. Furthermore, as the results described herein demonstrate, the predictor polynucleotides are able to accurately predict the sensitivity and/or resistance of prostate cancer cell line test samples to exposure to BMS-A. However, it would also be important to demonstrate that these predictor polynucleotides are also able to predict the sensitivity and/or resistance of cancer cell line test samples to exposure to BMS-A derived from a tissue type other than prostate tissue.

[0139] Thus, in accordance with the present invention, an approach has been developed in which predictor polynucleotides, and/or combinations of predictor polynucleotides, have been discovered whose expression pattern in a subset of prostate cell lines correlates with response to treatment with compounds that inhibit the function of protein tyrosine kinases, and can be used as in predicting additional samples of same tissue types (breast), as well as different tissue types (lung), among others. It is expected that these predictor polynucleotides will be useful in predicting the sensitivity and/or resistance of other tissue types, including, but not limited to, colon, and prostate, tissue, and in particular, colon cancer and prostate cancer tissues.

### Applications of Predictor Sets

[0140] Predictor sets with different error rates can be used in different applications. Predictor sets can be built from any combination of the polynucleotides listed in Table 2, or the predictor polynucleotide subsets of 14, 10, and 5 polynucleotides, as presented in each of Tables 2, 3, 4, and 5 respectively, to make predictions about the likely effect of protein tyrosine modulator compounds, e.g., BMS-A, protein tyrosine kinase inhibitors, or compounds that affect a protein tyrosine kinase signaling pathway in different biological systems. The various predictor sets described herein, or the combination of these predictor sets with other polynucleotides or other co-variants of these polynucleotides, can have broad utility. For example, the predictor sets can be used as diagnostic or prognostic indicators in disease management; they can be used to predict how patients with cancer might respond to therapeutic intervention with compounds that modulate the protein tyrosine kinase family (e.g., the src tyrosine kinase family); and they can be used to predict how patients might respond to therapeutic intervention that modulate signaling through an entire protein tyrosine kinase regulatory pathway, such as, for example, the src tyrosine kinase regulatory pathway.

[0141] While the data described herein were generated in cell lines that are routinely used to screen for and identify compounds that have potential utility for cancer therapy, the predictors can have both diagnostic and prognostic value in other diseases areas in which signaling through a protein tyrosine kinase or a protein tyrosine kinase pathway is of importance, e.g., in immunology, or in cancers or tumors in which cell signaling and/or proliferation controls have gone awry. Such protein tyrosine kinases and their pathways comprise, for example, members of the Src family of tyrosine kinases, for example, Src, Fgr, Fyn, Yes, Blk, Hck, Lck and Lyn, as well as other protein tyrosine kinases, including, Bcr-abl, Jak, PDGFR, c-kit and Eph receptors. Although the data described herein have been generated using the particularly exemplified protein tyrosine kinase inhibitor compound, BMS-A, three other protein tyrosine kinase inhibitor compounds were tested in addition to BMS-A and were found to have similar sensitivity and resistance classifications in the 23 breast cell lines evaluated. Thus, the predictors can have both diagnostic and prognostic value related to other inhibitor molecules, as well as any molecules or therapeutic interventions that affect protein tyrosine kinases, such as Src tyrosine kinase, or a protein tyrosine kinase signaling pathways, such as that of the Src tyrosine kinase.

[0142] Those having skill in the pertinent art will appreciate that protein tyrosine kinase pathways, e.g., the Src tyrosine kinase pathway, are present and functional in cell types other than cell lines of breast tissue. Therefore, the described predictor set of polynucleotides, or combinations of polynucleotides within the predictor set, can show utility for predicting drug sensitivity or resistance to compounds that interact with, or inhibit, a protein tyrosine kinase activity in cells from other tissues or organs associated with a disease state, or cancers or tumors derived from other tissue or organ types. Non-limiting examples of such cells, tissues and organs include colon, breast, lung, heart, prostate, testes, ovaries, cervix, esophagus, pancreas, spleen, liver, kidney, intestine, stomach, lymphocytic and brain, thereby providing a broad and advantageous applicability to the predictor polynucleotide sets described herein. Cells for analysis can be obtained by conventional procedures as known in the art, for example, tissue or organ biopsy, aspiration, sloughed cells, e.g., colonocytes, clinical or medical tissue, or cell sampling procedures.

Functionality of Polynucleotides that Make Up a Predictor Set

[0143] The use of a predictor, or predictor set, (e.g., predictor polynucleotides, or a predictor set of polynucleotides) allows for the prediction of an outcome prior to having any knowledge about a biological system. Essentially, a predictor can be considered to be a tool that is useful in predicting the phenotype that is used to classify the biological system. In the specific embodiment provided by the present invention, the classification as “resistant” or “sensitive” is based on the IC₅₀ value of each cell line to a compound (e.g., the protein tyrosine kinase inhibitor compound BMS-A as exemplified herein).

[0144] As a particular example, a number of the polynucleotides described herein (Table 2) are known to be substrates for the src tyrosine kinase family, e.g., caveolin-1 and caveolin-2 (M. T. Brown and J. A. Cooper, Biochemica et Biophysica Acta, 1287:121-149 (1996)). EphA2 is a tyrosine kinase receptor. The data presented herein demonstrated that EphA2 is highly expressed in the sensitive cell lines, and its expression level and activity are down regulated by treatment of the protein tyrosine kinase inhibitor compound BMS-A. This is expected, since polynucleotides that contribute to a high predictor accuracy are likely to play a functional role in the pathway that is being modulated. For example, HERCEPTIN® therapy (i.e., antibody that binds to the Her2 receptor and prevents function via internalization) is indicated when the Her2 polynucleotide is overexpressed. It is unlikely, although not impossible, that a therapy will have a therapeutic effect if the target enzyme is not expressed.

[0145] However, although the complete function of some of the polynucleotides and their functional products (proteins and mRNAs) that make up a predictor set are not currently known, some of the polynucleotides are likely to be directly or indirectly involved in a protein tyrosine kinase signaling pathway, such as the Src tyrosine kinase signaling pathway. In addition, some of the polynucleotides in the predictor set may function in the metabolic or other resistance pathways specific to the compounds being tested. Notwithstanding, a knowledge about the function of the polynucleotides is not a requisite for determining the accuracy of a predictor according to the practice of the present invention.

[0146] As described herein, polynucleotides have been discovered that correlate to the relative intrinsic sensitivity or resistance of prostate cell lines to treatment with compounds that interact with and inhibit protein tyrosine kinases, e.g., Src tyrosine kinase. These polynucleotides have been shown, through a weighted voting, leave-one-out, cross validation program, to have utility in predicting the intrinsic resistance and sensitivity of prostate cell lines to these compounds.

[0147] An embodiment of the present invention relates to a method of determining or predicting if an individual requiring drug or chemotherapeutic treatment or therapy for a disease, for example, a prostate cancer or a prostate tumor, will be likely to successfully respond or not respond to the drug or chemotherapeutic agent prior to subjecting the individual to such treatment or chemotherapy. The drug or chemotherapeutic agent can be one that modulates a protein tyrosine kinase activity or signaling involving a protein tyrosine kinase. Nonlimiting examples of such protein tyrosine kinases include members of the Src family of tyrosine kinases, for example, Src, Fgr, Fyn, Yes, Blk, Hck, Lck and Lyn, as well as other protein tyrosine kinases, including, Bcr-abl, Jak, PDGFR, c-kit and Eph receptors. In accordance with the method of the invention, cells from a tissue or organ associated with disease, e.g., a patient biopsy of a tumor or cancer, preferably a prostate cancer or tumor biopsy, are subjected to an in vitro assay as described herein, to determine their marker polynucleotide expression pattern (polynucleotides from Table 2 and/or the predictor polynucleotide subsets of Tables 3, 4, or 5) prior to their treatment with the compound or drug, preferably an inhibitor of a protein tyrosine kinase. The resulting polynucleotide expression profile of the cells before drug treatment is compared with the polynucleotide expression pattern of the same polynucleotides in cells that are either resistant or sensitive to the drug or compound, as provided by the present invention.

[0148] In another related embodiment, the present invention includes a method of predicting, prognosing, diagnosing, and/or determining whether an individual requiring drug therapy for a disease state or chemotherapeutic for cancer (e.g., prostate cancer) will or will not respond to treatment prior to administration of treatment. The treatment or therapy preferably involves a protein tyrosine kinase modulating agent, compound, or drug, for example, an inhibitor of the protein tyrosine kinase activity. Protein tyrosine kinases include, without limitation, members of the Src family of tyrosine kinases, for example, Src, Fgr, Fyn, Yes, Blk, Hck, Lck and Lyn, as well as other protein tyrosine kinases, including, Bcr-abl, Jak, PDGFR, c-kit and Eph receptors. Preferred is src tyrosine kinase and inhibitors thereof. In accordance with this embodiment, cells from a patient's tissue sample, e.g., a prostate tumor or cancer biopsy, are assayed to determine their polynucleotide expression pattern prior to treatment with the protein tyrosine kinase modulating agent, compound, or drug. The resulting polynucleotide expression profile of the test cells before exposure to the compound or drug is compared with that of one or more of the predictor subsets of polynucleotides comprising either 174, 14, 10, or 5 polynucleotides as described herein and shown in Table 2, Tables 3, 4, or 5, respectively.

[0149] Success or failure of treatment of a patient's cancer or tumor with the drug can be determined based on the polynucleotide expression pattern of the patient's cells being tested, compared with the polynucleotide expression pattern of the predictor polynucleotides in the resistant or sensitive panel of that have been exposed to the drug or compound and subjected to the predictor polynucleotide analysis detailed herein. Thus, if following exposure to the drug, the test cells show a polynucleotide expression pattern corresponding to that of the predictor polynucleotide set of the control panel of cells that is sensitive to the drug or compound, it is highly likely or predicted that the individual's cancer or tumor will respond favorably to treatment with the drug or compound. By contrast, if, after drug exposure, the test cells show a polynucleotide expression pattern corresponding to that of the predictor polynucleotide set of the control panel of cells that is resistant to the drug or compound, it is highly likely or predicted that the individual's cancer or tumor will not respond to treatment with the drug or compound.

[0150] In a related embodiment, screening assays are provided for determining if a patient's cancer or tumor is or will be susceptible or resistant to treatment with a drug or compound, particularly, a drug or compound directly or indirectly involved in protein tyrosine kinase activity or a protein tyrosine kinase pathway, e.g., the Src tyrosine kinase activity or pathway.

[0151] Also provided by the present invention are monitoring assays to monitor the progress of a drug treatment involving drugs or compounds that interact with or inhibit protein tyrosine kinase activity. Protein tyrosine kinases encompassed by these monitoring assays include members of the Src family of tyrosine kinases, for example, Src, Fgr, Fyn, Yes, Blk, Hck, Lck and Lyn, as well as other protein tyrosine kinases, including, Bcr-abl, Jak, PDGFR, c-kit and Eph receptors. Such in vitro assays are capable of monitoring the treatment of a patient having a disease treatable by a compound or agent that modulates or interacts with a protein tyrosine kinase by comparing the resistance or sensitivity polynucleotide expression pattern of cells from a patient tissue sample, e.g., a tumor or cancer biopsy, preferably a prostate cancer or tumor sample, prior to treatment with a drug or compound that inhibits the protein tyrosine kinase activity and again following treatment with the drug or compound with the expression pattern of one or more of the predictor polynucleotide sets described, or combinations thereof. Isolated cells from the patient are assayed to determine their polynucleotide expression pattern before and after exposure to a compound or drug, preferably a protein tyrosine kinase inhibitor, to determine if a change of the polynucleotide expression profile has occurred so as to warrant treatment with another drug or agent, or discontinuing current treatment. The resulting polynucleotide expression profile of the cells tested before and after treatment is compared with the polynucleotide expression pattern of the predictor set of polynucleotides that have been described and shown herein to be highly expressed in cells that are either resistant or sensitive to the drug or compound. Alternatively, a patient's progress related to drug treatment or therapy can be monitored by obtaining a polynucleotide expression profile as described above, only after the patient has undergone treatment with a given drug or therapeutic compound. In this way, there is no need to test a patient sample prior to treatment with the drug or compound.

[0152] Such a monitoring process can indicate success or failure of a patient's treatment with a drug or compound based on the polynucleotide expression pattern of the cells isolated from the patient's sample, e.g., a tumor or cancer biopsy, as being relatively the same as or different from the polynucleotide expression pattern of the predictor polynucleotide set of the resistant or sensitive control panel of cells that have been exposed to the drug or compound and assessed for their polynucleotide expression profile following exposure. Thus, if, after treatment with a drug or compound, the test cells show a change in their polynucleotide expression profile from that seen prior to treatment to one which corresponds to that of the predictor polynucleotide set of the control panel of cells that are resistant to the drug or compound, it can serve as an indicator that the current treatment should be modified, changed, or even discontinued. Also, should a patient's response be one that shows sensitivity to treatment by a protein tyrosine kinase inhibitor compound, e.g., a Src tyrosine kinase inhibitor, based on correlation of the expression profile of the predictor polynucleotides of cells showing drug sensitivity with the polynucleotide expression profile from cells from a patient undergoing treatment, the patient's treatment prognosis can be qualified as favorable and treatment can continue. Further, if a patient has not been tested prior to drug treatment, the results obtained after treatment can be used to determine the resistance or sensitivity of the cells to the drug based on the polynucleotide expression profile compared with the predictor polynucleotide set.

[0153] In a related embodiment, the present invention embraces a method of monitoring the treatment of a patient having a disease treatable by a compound or agent that modulates a protein tyrosine kinase, i.e., prostate cancer. Protein tyrosine kinases encompassed by such treatment monitoring assays include members of the Src family of tyrosine kinases, for example, Src, Fgr, Fyn, Yes, Blk, Hck, Lck and Lyn, as well as other protein tyrosine kinases, including, Bcr-abl, Jak, PDGFR, c-kit and Eph receptors. For these assays, test cells from the patient are assayed to determine their polynucleotide expression pattern before and after exposure to a protein tyrosine kinase inhibitor compound or drug. The resulting polynucleotide expression profile of the cells tested before and after treatment is compared with the polynucleotide expression pattern of the predictor set of polynucleotides that have been described and shown herein to be highly expressed in cells that are either resistant or sensitive to the drug or compound. Thus, if a patient's response is or becomes one that is sensitive to treatment by a protein tyrosine kinase inhibitor compound, based on correlation of the expression profile of the predictor polynucleotides, the patient's treatment prognosis can be qualified as favorable and treatment can continue. Also, if after treatment with a drug or compound, the test cells do not exhibit a change in their polynucleotide expression profile to a profile that corresponds to that of the control panel of cells that are sensitive to the drug or compound, this serves as an indicator that the current treatment should be modified, changed, or even discontinued. Such monitoring processes can be repeated as necessary or desired and can indicate success or failure of a patient's treatment with a drug or compound, based on the polynucleotide expression pattern of the cells isolated from the patient's sample. The monitoring of a patient's response to a given drug treatment can also involve testing the patient's cells in the assay as described, only after treatment, rather than before and after treatment, with drug or active compound.

[0154] In a preferred embodiment, the present invention embraces a method of monitoring the treatment of a patient having a disease treatable by a compound or agent that modulates a src tyrosine kinase, i.e., prostate cancer. The test cells from the patient are assayed to determine their polynucleotide expression pattern before and after exposure to a src tyrosine kinase inhibitor compound or drug. The resulting polynucleotide expression profile of the cells tested before and after treatment is compared with the polynucleotide expression pattern of the predictor set of polynucleotides that have been described and shown herein to be highly expressed in cells that are either resistant or sensitive to the drug or compound. Thus, if a patient's response is or becomes one that is sensitive to treatment by a src tyrosine kinase inhibitor compound, based on correlation of the expression profile of the predictor polynucleotides, the patient's treatment prognosis can be qualified as favorable and treatment can continue. Also, if after treatment with a drug or compound, the test cells do not exhibit a change in their polynucleotide expression profile to a profile that corresponds to that of the control panel of cells that are sensitive to the drug or compound, this serves as an indicator that the current treatment should be modified, changed, or even discontinued. Such monitoring processes can be repeated as necessary or desired and can indicate success or failure of a patient's treatment with a drug or compound, based on the polynucleotide expression pattern of the cells isolated from the patient's sample. The monitoring of a patient's response to a given drug treatment can also involve testing the patient's cells in the assay as described only after treatment, rather than before and after treatment, with drug or active compound.

[0155] In another embodiment, the present invention encompasses a method of classifying whether a biological system, preferably cells from a tissue, organ, tumor or cancer of an afflicted individual, will be resistant or sensitive to a compound that modulates the system. In a preferred aspect of this invention, the sensitivity or resistance of cells, e.g., those obtained from a tumor or cancer, to a protein tyrosine kinase inhibitor compound, or series of compounds, e.g., a Src tyrosine kinase inhibitor, is determined Inhibitors can include those compounds, drugs, or biological agents that inhibit, either directly or indirectly, the protein tyrosine kinases as described previously hereinabove. According to the method, a resistance/sensitivity profile of the cells after exposure to the protein tyrosine kinase inhibitor drug or compound can be determined via polynucleotide expression profiling protocols set forth herein. Such resistance/sensitivity profile of the cells reflects an IC₅₀ value of the cells to the compound(s) as determined using a suitable assay, such as an in vitro assay as described in Example 1. A procedure of this sort can be performed using a variety of cell types and compounds that interact with the protein tyrosine kinase, or affect its activity in the signaling pathway of the protein tyrosine kinase.

[0156] In another of its embodiments, the present invention includes the preparation of one or more specialized microarrays (e.g., oligonucleotide microarrays or cDNA microarrays) comprising all of the polynucleotides in Tables 2, 3, 4, or 5, or any combinations thereof, of the predictor polynucleotide sets described herein that have been demonstrated to be most highly correlated with sensitivity (or resistance) to protein tyrosine kinase modulators, particularly inhibitors of src tyrosine kinase. Preferably, the predictor polynucleotide sets are common for predicting sensitivity among more than one protein tyrosine kinase modulator, e.g., a protein tyrosine kinase inhibitor such as a Src tyrosine kinase inhibitor, as demonstrated herein. In accordance with this aspect of the invention, the oligonucleotide sequences or cDNA sequences include any of the predictor polynucleotides or polynucleotide combinations as described herein, which are highly expressed in resistant or sensitive cells, and are contained on a microarray, e.g., a oligonucleotide microarray or cDNA microarray in association with, or introduced onto, any supporting material, such as glass slides, nylon membrane filters, glass or polymer beads, chips, plates, or other types of suitable substrate material.

[0157] Cellular nucleic acid, e.g., RNA, is isolated either from cells undergoing testing after exposure to a drug or compound that interacts with a protein tyrosine kinase as described herein, or its signaling pathway, or from cells being tested to obtain an initial determination or prediction of the cells' sensitivity to the drug or compound, and, ultimately, a prediction of treatment outcome with the drug or compound. The isolated nucleic acid is appropriately labeled and applied to one or more of the specialized microarrays. The resulting pattern of polynucleotide expression on the specialized microarray is analyzed as described herein and known in the art. A pattern of polynucleotide expression correlating with either sensitivity or resistance to the drug or compound is able to be determined, e.g., via comparison with the polynucleotide expression pattern as shown in FIG. 1 for the panel of cells exposed to the protein tyrosine kinase inhibitor assayed herein.

[0158] In accordance with the specialized microarray embodiment of this invention, the microarray contains the polynucleotides of one or more of the predictor polynucleotide set(s) or subset(s), or a combination thereof, or all of the polynucleotides in Tables 2, 3, 4, or 5, that are highly correlated with drug sensitivity or resistance by a prostate cell type. If the nucleic acid target isolated from test cells, such as tumor or cancer cells, preferably prostate cancer or tumor cells, shows a high level of detectable binding to the polynucleotides of the predictor set for drug sensitivity relative to control, then it can be predicted that a patient's cells will respond to the drug, or a series of drugs, and that the patient's response to the drug, or a series of drugs, will be favorable.

[0159] Such a result predicts that the cells of a tumor or cancer are good candidates for the successful treatment or therapy utilizing the drug, or series of drugs. Alternatively, if the nucleic acid target isolated from test cells shows a high level of detectable binding to the polynucleotides of the predictor set for drug resistance, relative to control, then it can be predicted that a patient is likely not to respond to the drug, or a series of drugs, and that the patient's response to the drug, or a series of drugs, is not likely to be favorable. Such a result predicts that the cells of a tumor or cancer are not good candidates for treatment or therapy utilizing the drug, or series of drugs.

[0160] The utilization of microarray technology is known and practiced in the art. Briefly, to determine polynucleotide expression using microarray technology, polynucleotides, e.g., RNA, DNA, cDNA, preferably RNA, are isolated from a biological sample, e.g., cells, as described herein for prostate cells, using procedures and techniques that are practiced in the art. The isolated nucleic acid is detectably labeled, e.g., fluorescent, enzyme, radionuclide, or chemiluminescent label, and applied to a microarray, e.g., the specialized microarrays provided by this invention. The array is then washed to remove unbound material and visualized by staining or fluorescence, or other means known in the art depending on the type of label utilized.

[0161] In another embodiment of this invention, the predictor polynucleotides (Table 2), or one or more subsets of polynucleotides comprising the predictor polynucleotide sets (e.g., Tables 3, 4, or 5) can be used as biomarkers for cells that are resistant or sensitive to protein tyrosine kinase inhibitor compounds, e.g., Src tyrosine kinase inhibitors. With the predictor polynucleotides in hand, screening and detection assays can be carried out to determine whether or not a given compound, preferably a protein tyrosine kinase inhibitor compound such as a Src tyrosine kinase inhibitor compound, elicits a sensitive or a resistant phenotype following exposure of cells, e.g., cells taken from a tumor or cancer biopsy sample, such as a prostate cancer cell sample, to the compound. Thus, methods of screening, monitoring, detecting, prognosing and/or diagnosing to determine the resistance or sensitivity of cells to a drug or compound that interacts with a protein tyrosine kinase, or a protein tyrosine kinase pathway, preferably an inhibitor compound, and to which the cells are exposed, are encompassed by the present invention.

[0162] Such methods embrace a variety of procedures and assays to determine and assess the expression of polynucleotides, in particular, the predictor or src biomarker polynucleotides and predictor polynucleotide subsets as described herein (Tables 2, 3, 4, or 5), in cells that have been exposed to drugs or compounds that interact with or effect a protein tyrosine kinase, or a protein tyrosine kinase pathway, wherein the protein tyrosine kinases include members of the Src family of tyrosine kinases, for example, Src, Fgr, Fyn, Yes, Blk, Hck, Lck and Lyn, as well as other protein tyrosine kinases, including, Bcr-abl, Jak, PDGFR, c-kit and Eph receptors. Suitable methods include detection and evaluation of polynucleotide activation or expression at the level of nucleic acid, e.g., DNA, RNA, mRNA, and detection and evaluation of encoded protein. For example, PCR assays as known and practiced in the art can be employed to quantify RNA or DNA in cells being assayed for susceptibility to drug treatment, for example, protein tyrosine kinase inhibitors. (see Example 3, RT-PCR).

[0163] In another embodiment, the present invention is directed to a method of identifying cells, tissues, and/or patients that are predicted to be resistant to either protein tyrosine inhibitor compounds or compounds that affect protein tyrosine kinase signaling pathways, e.g., Src tyrosine kinase, or that are resistant in different biological systems to those compounds. The method comprises the step(s) of: (i) analyzing the expression of only those polynucleotides listed in Tables 2, 3, 4, or 5, or any combination thereof, that have been shown to be correlative to predicting resistant responses to such compounds; (ii) comparing the observed expression levels of those correlative resistant polynucleotides in the test cells, tissues, and/or patients to the expression levels of those same polynucleotides in a cell line that is known to be resistant to the compounds; and (iii) predicting whether the cells, tissues, and/or patients are resistant to the compounds based upon the overall similarity of the observed expression of those polynucleotides in step (ii).

[0164] In another embodiment, the present invention is directed to a method of identifying cells, tissues, and/or patients that are predicted to be sensitive to either protein tyrosine inhibitor compounds or compounds that affect protein tyrosine kinase signaling pathways, e.g., the Src tyrosine kinase, or that are sensitive in different biological systems to those compounds. The method involves the step(s) of: (i) analyzing the expression of only those polynucleotides listed in Tables 2, 3, 4, or 5, or any combination thereof, that have been shown to be correlative to predicting sensitive responses to such compounds; (ii) comparing the observed expression levels of those correlative sensitive polynucleotides in the test cells, tissues, and/or patients to the expression levels of those same polynucleotides in a cell line that is known to be sensitive to the compounds; and (iii) predicting whether the cells, tissues, and/or patients are sensitive to the compounds based upon the overall similarity of the observed expression of those polynucleotides in step (ii).

[0165] The present invention further encompasses the detection and/or quantification of one or more of the protein tyrosine kinase biomarker proteins of the present invention using antibody-based assays (e.g., immunoassays) and/or detection systems. As mentioned, protein tyrosine kinases encompass members of the Src family of tyrosine kinases, for example, Src, Fgr, Fyn, Yes, Blk, Hck, Lck and Lyn, as well as other protein tyrosine kinases, including, Bcr-abl, Jak, PDGFR, c-kit and Eph receptors. Such assays include the following non-limiting examples, ELISA, immunofluorescence, fluorescence activated cell sorting (FACS), Western Blots, etc., as further described herein.

[0166] In another embodiment, the human protein tyrosine kinase biomarker polypeptides and/or peptides of the present invention, or immunogenic fragments or oligopeptides thereof, can be used for screening therapeutic drugs or compounds in a variety of drug screening techniques. The fragment employed in such a screening assay can be free in solution, affixed to a solid support, borne on a cell surface, or located intracellularly. The reduction or abolition of activity of the formation of binding complexes between the biomarker protein and the agent being tested can be measured. Thus, the present invention provides a method for screening or assessing a plurality of compounds for their specific binding affinity with a protein kinase inhibitor biomarker polypeptide, or a bindable peptide fragment thereof, of this invention. The method comprises the steps of providing a plurality of compounds; combining the protein kinase inhibitor biomarker polypeptide, or a bindable peptide fragment thereof, with each of the plurality of compounds, for a time sufficient to allow binding under suitable conditions; and detecting binding of the biomarker polypeptide or peptide to each of the plurality of test compounds, thereby identifying the compounds that specifically bind to the biomarker polypeptide or peptide. More specifically, the biomarker polypeptide or peptide is that of a Src tyrosine kinase inhibitor biomarkers.

[0167] Methods to identify compounds that modulate the activity of the human protein tyrosine kinase biomarker polypeptides and/or peptides provided in Table 2 by the present invention, comprise combining a candidate compound or drug modulator of protein kinases and measuring an effect of the candidate compound or drug modulator on the biological activity of the protein kinase inhibitor biomarker polypeptide or peptide. Such measurable effects include, for example, a physical binding interaction; the ability to cleave a suitable protein kinase substrate; effects on a native and cloned protein kinase biomarker-expressing cell line; and effects of modulators or other protein kinase-mediated physiological measures.

[0168] Another method of identifying compounds that modulate the biological activity of the protein tyrosine kinase biomarker polypeptides of the present invention comprises combining a potential or candidate compound or drug modulator of a protein tyrosine kinase biological activity, e.g., a Src tyrosine kinase, with a host cell that expresses the protein tyrosine kinase biomarker polypeptide and measuring an effect of the candidate compound or drug modulator on the biological activity of the protein tyrosine kinase biomarker polypeptides. The host cell can also be capable of being induced to express the protein tyrosine kinase biomarker polypeptide, e.g., via inducible expression. Physiological effects of a given modulator candidate on the protein tyrosine kinase biomarker polypeptide can also be measured. Thus, cellular assays for particular protein tyrosine kinase modulators, e.g., a src kinase modulator, can be either direct measurement or quantification of the physical biological activity of the protein tyrosine kinase biomarker polypeptide, or they may be measurement or quantification of a physiological effect. Such methods preferably employ a protein tyrosine kinase biomarker polypeptide as described herein, or an overexpressed recombinant protein tyrosine kinase biomarker polypeptide in suitable host cells containing an expression vector as described herein, wherein the protein tyrosine kinase biomarker polypeptide is expressed, overexpressed, or undergoes up-regulated expression.

[0169] Another aspect of the present invention embraces a method of screening for a compound that is capable of modulating the biological activity of a protein tyrosine kinase biomarker polypeptide, e.g., a Src kinase biomarker polypeptide. The method comprises providing a host cell containing an expression vector harboring a nucleic acid sequence encoding a protein tyrosine kinase biomarker polypeptide, or a functional peptide or portion thereof (e.g., the src polypeptide, protein, peptide, or fragment sequences as set forth in Table 2, or the Sequence Listing herein); determining the biological activity of the expressed protein tyrosine kinase biomarker polypeptide in the absence of a modulator compound; contacting the cell with the modulator compound and determining the biological activity of the expressed protein tyrosine kinase biomarker polypeptide in the presence of the modulator compound. In such a method, a difference between the activity of the protein tyrosine kinase biomarker polypeptide in the presence of the modulator compound and in the absence of the modulator compound indicates a modulating effect of the compound.

[0170] Essentially any chemical compound can be employed as a potential modulator or ligand in the assays according to the present invention. Compounds tested as protein tyrosine kinase modulators can be any small chemical compound, or biological entity (e.g., protein, sugar, nucleic acid, or lipid). Test compounds are typically small chemical molecules and peptides. Generally, the compounds used as potential modulators can be dissolved in aqueous or organic (e.g., DMSO-based) solutions. The assays are designed to screen large chemical libraries by automating the assay steps and providing compounds from any convenient source. Assays are typically run in parallel, for example, in microtiter formats on microtiter plates in robotic assays. There are many suppliers of chemical compounds, including, for example, Sigma (St. Louis, Mo.), Aldrich (St. Louis, Mo.), Sigma-Aldrich (St. Louis, Mo.), Fluka Chemika-Biochemica Analytika (Buchs, Switzerland). Also, compounds can be synthesized by methods known in the art.

[0171] High throughput screening methodologies are particularly envisioned for the detection of modulators of the novel protein tyrosine kinase biomarker, e.g., src biomarker, polynucleotides and polypeptides described herein. Such high throughput screening methods typically involve providing a combinatorial chemical or peptide library containing a large number of potential therapeutic compounds (e.g., ligand or modulator compounds). The combinatorial chemical libraries or ligand libraries are then screened in one or more assays to identify those library members (e.g., particular chemical species or subclasses) that display a desired characteristic activity. The compounds so identified can serve as conventional lead compounds, or can themselves be used as potential or actual therapeutics.

[0172] A combinatorial chemical library is a collection of diverse chemical compounds generated either by chemical synthesis or biological synthesis, prepared by combining a number of chemical building blocks (i.e., reagents such as amino acids). As an example, a linear combinatorial library, e.g., a polypeptide or peptide library, is formed by combining a set of chemical building blocks in every possible way for a given compound length (i.e., the number of amino acids in a polypeptide or peptide compound). Millions of chemical compounds can be synthesized through such combinatorial mixing of chemical building blocks.

[0173] The preparation and screening of combinatorial chemical libraries is well known to those having skill in the pertinent art. Combinatorial libraries include, without limitation, peptide libraries (e.g., U.S. Pat. No. 5,010,175; Furka, Int. J. Pept. Prot. Res., 37:487-493 (1991); and Houghton et al., Nature, 354:84-88 (1991)). Other chemistries for generating chemical diversity libraries can also be used. Nonlimiting examples of chemical diversity library chemistries include, peptoids (PCT Publication No. WO 91/019735), encoded peptides (PCT Publication No. WO 93/20242), random bio-oligomers (PCT Publication No. WO 92/00091), benzodiazepines (U.S. Pat. No. 5,288,514), diversomers such as hydantoins, benzodiazepines and dipeptides (Hobbs et al., Proc. Natl. Acad. Sci. USA, 90:6909-6913 (1993)), vinylogous polypeptides (Hagihara et al., J. Amer. Chem. Soc., 114:6568 (1992)), nonpeptidal peptidomimetics with glucose scaffolding (Hirschmann et al., J. Amer. Chem. Soc., 114:9217-9218 (1992)), analogous organic synthesis of small compound libraries (Chen et al., J. Amer. Chem. Soc., 116:2661 (1994)), oligocarbamates (Cho et al., Science, 261:1303 (1993)), and/or peptidyl phosphonates (Campbell et al., J. Org. Chem., 59:658 (1994)), nucleic acid libraries (see Ausubel, Berger and Sambrook, all supra), peptide nucleic acid libraries (U.S. Pat. No. 5,539,083), antibody libraries (e.g., Vaughn et al., Nature Biotechnology, 14(3):309-314 (1996) and PCT/US96/10287), carbohydrate libraries (e.g., Liang et al., Science, 274-1520-1522 (1996) and U.S. Pat. No. 5,593,853), small organic molecule libraries (e.g., benzodiazepines, Baum, C&EN, p. 33 (Jan. 18, 1993) and U.S. Pat. No. 5,288,514); isoprenoids (U.S. Pat. No. 5,569,588); thiazolidinones and metathiazanones (U.S. Pat. No. 5,549,974); pyrrolidines (U.S. Pat. Nos. 5,525,735 and 5,519,134); morpholino compounds (U.S. Pat. No. 5,506,337); and the like.

[0174] Devices for the preparation of combinatorial libraries are commercially available (e.g., 357 MPS, 390 MPS, Advanced Chem Tech, Louisville Ky.; Symphony, Rainin, Woburn, Mass.; 433A Applied Biosystems, Foster City, Calif.; 9050 Plus, Millipore, Bedford, Mass.). In addition, a large number of combinatorial libraries are commercially available (e.g., ComGenex, Princeton, N.J.; Asinex, Moscow, Russia; Tripos, Inc., St. Louis, Mo.; ChemStar, Ltd., Moscow, Russia; 3D Pharmaceuticals, Exton, Pa.; Martek Biosciences, Columbia, Md., and the like).

[0175] In one aspect, the invention provides solid phase-based in vitro assays in a high throughput format, where the cell or tissue expressing a tyrosine kinase protein/polypeptide/peptide is attached to a solid phase substrate. In such high throughput assays, it is possible to screen up to several thousand different modulators or ligands in a single day. In particular, each well of a microtiter plate can be used to perform a separate assay against a selected potential modulator, or, if concentration or incubation time effects are to be observed, every 5-10 wells can be used to test a single modulator. Thus, a single standard microtiter plate can be used in to assay about 96 modulators. If 1536 well plates are used, then a single plate can easily assay from about 100 to about 1500 different compounds. It is possible to assay several different plates per day; thus, for example, assay screens for up to about 6,000-20,000 different compounds are possible using the described integrated systems.

[0176] In another of its aspects, the present invention encompasses screening and small molecule (e.g., drug) detection assays which involve the detection or identification of small molecules that can bind to a given protein, i.e., a tyrosine kinase biomarker polypeptide or peptide, such as a Src tyrosine kinase biomarker polypeptide or peptide. Particularly preferred are assays suitable for high throughput screening methodologies.

[0177] In such binding-based detection, identification, or screening assays, a functional assay is not typically required. All that is needed, in general, is a target protein, preferably substantially purified, and a library or panel of compounds (e.g., ligands, drugs, or small molecules), or biological entities to be screened or assayed for binding to the protein target. Preferably, most small molecules that bind to the target protein modulate the target's activity in some manner due to preferential, higher affinity binding to functional areas or sites on the protein.

[0178] An example of such an assay is the fluorescence based thermal shift assay (3-Dimensional Pharmaceuticals, Inc., 3DP, Exton, Pa.) as described in U.S. Pat. Nos. 6,020,141 and 6,036,920 to Pantoliano et al. (See also, J. Zimmerman, Gen. Eng. News, 20(8) (2000)). The assay allows the detection of small molecules (e.g., drugs, ligands) that bind to expressed, and preferably purified, tyrosine kinase biomarker proteins/polypeptides/peptides, such as the Src tyrosine kinase, based on affinity of binding determinations by analyzing thermal unfolding curves of protein-drug or ligand complexes. The drugs or binding molecules determined by this technique can be further assayed, if desired, by methods such as those described herein to determine if the molecules affect or modulate function or activity of the target protein.

[0179] To purify a tyrosine kinase biomarker polypeptide or peptide, e.g., Src tyrosine kinase, to measure a biological binding or ligand binding activity, the source may be a whole cell lysate that can be prepared by successive freeze-thaw cycles (e.g., one to three) in the presence of standard protease inhibitors. The tyrosine kinase biomarker polypeptide can be partially or completely purified by standard protein purification methods, e.g., affinity chromatography using specific antibody(ies) described herein, or by ligands specific for an epitope tag engineered into the recombinant tyrosine kinase biomarker polypeptide molecule, also as described herein. Binding activity can then be measured as described.

[0180] Compounds which are identified according to the methods provided herein, and which modulate or regulate the biological activity or physiology of the tyrosine kinase biomarker polypeptides according to the present invention, are a preferred embodiment of this invention. It is contemplated that such modulatory compounds can be employed in treatment and therapeutic methods for treating a condition that is mediated by the tyrosine kinase biomarker polypeptides, e.g., Src tyrosine kinase biomarker polypeptides, by administering to an individual in need of such treatment a therapeutically effective amount of the compound identified by the methods described herein.

[0181] In addition, the present invention provides methods for treating an individual in need of such treatment for a disease, disorder, or condition that is mediated by the tyrosine kinase biomarker polypeptides of the invention, comprising administering to the individual a therapeutically effective amount of the tyrosine kinase biomarker-modulating compound identified by a method provided herein. In accordance with this invention, the tyrosine kinase biomarker polypeptides or proteins encompassed by the methods include members of the Src family of tyrosine kinases, for example, Src, Fgr, Fyn, Yes, Blk, Hck, Lck and Lyn, as well as other protein tyrosine kinases, including, Bcr-abl, Jak, PDGFR, c-kit and Eph receptors.

[0182] The present invention particularly provides methods for treating an individual in need of such treatment for a disease, disorder, or condition that is mediated by Src biomarker polypeptides of the invention, comprising administering to the individual a therapeutically effective amount of the Src biomarker-modulating compound identified by a method provided herein.

[0183] The present invention further encompasses polypeptides comprising, or alternatively consisting of, an epitope of the polypeptide having an amino acid sequence of one or more of the protein tyrosine kinase biomarkers, preferably the Src biomarker amino acid sequences as set forth in Table 2. The present invention also encompasses polynucleotide sequences encoding an epitope of a polypeptide sequence of the protein tyrosine kinase biomarkers of the invention.

[0184] The term “epitopes” as used herein, refers to portions of a polypeptide having antigenic or immunogenic activity in an animal, preferably a mammal, and most preferably a human. In a preferred embodiment, the present invention encompasses a polypeptide comprising an epitope, as well as the polynucleotide encoding this polypeptide. An “immunogenic epitope” as used herein, refers to a portion of a protein that elicits an antibody response in an animal, as determined by any method known in the art, for example, by the methods for generating antibodies described infra. (See, for example, Geysen et al., Proc. Natl. Acad. Sci. USA, 81:3998-4002 (1983)). The term “antigenic epitope” as used herein refers to a portion of a protein to which an antibody can immunospecifically bind to its antigen as determined by any method well known in the art, for example, by the immunoassays described herein. Immunospecific binding excludes non-specific binding, but does not necessarily exclude cross-reactivity with other antigens. Antigenic epitopes need not necessarily be immunogenic. Either the full-length protein or an antigenic peptide fragment can be used. Antibodies are preferably prepared from these regions or from discrete fragments in regions of the tyrosine kinase biomarker nucleic acid and protein sequences comprising an epitope. Polypeptide or peptide fragments that function as epitopes may be produced by any conventional means. (See, e.g., Houghten, Proc. Natl. Acad. Sci. USA, 82:5131-5135 (1985); and as described in U.S. Pat. No. 4,631,211).

[0185] Moreover, antibodies can also be prepared from any region of the polypeptides and peptides of the protein tyrosine kinase biomarkers, including Src kinase biomarkers as described herein. In addition, if a polypeptide is a receptor protein, antibodies can be developed against an entire receptor or portions of the receptor, for example, the intracellular carboxy terminal domain, the amino terminal extracellular domain, the entire transmembrane domain, specific transmembrane segments, any of the intracellular or extracellular loops, or any portions of these regions. Antibodies can also be developed against specific functional sites, such as the site of ligand binding, or sites that are glycosylated, phosphorylated, myristylated, or amidated, for example.

[0186] In the present invention, antigenic epitopes for generating antibodies preferably contain a sequence of at least 4, at least 5, at least 6, at least 7, more preferably at least 8, at least 9, at least 10, at least 11, at least 12, at least 13, at least 14, at least 15, at least 20, at least 25, at least 30, at least 40, at least 50, and, most preferably, between about 15 to about 30 amino acid residues. Combinations of the foregoing epitopes are included. Preferred polypeptides comprising immunogenic or antigenic epitopes are at least 10, 15, 20, 25, 30, 35, 40, 45, 50, 55, 60, 65, 70, 75, 80, 85, 90, 95, or 100 amino acid residues in length. Additional non-exclusive preferred antigenic epitopes include the antigenic epitopes disclosed herein, as well as portions thereof, as well as any combination of two, three, four, five or more of these antigenic epitopes. Such antigenic epitopes can be used as the target molecules in immunoassays. (See, for instance, Wilson et al., Cell, 37:767-778 (1984); and Sutcliffe et al., Science, 219:660-666 (1983)). The fragments as described herein are not to be construed, however, as encompassing any fragments which may be disclosed prior to the invention.

[0187] Protein tyrosine kinase biomarker polypeptides comprising one or more immunogenic epitopes which elicit an antibody response can be introduced together with a carrier protein, such as an albumin, to an animal system (such as rabbit or mouse). Alternatively, if the polypeptide is of sufficient length (e.g., at least about 15-25 amino acids), the polypeptide can be presented without a carrier. However, immunogenic epitopes comprising as few as 5 to 10 amino acids have been shown to be sufficient to raise antibodies capable of binding to, at the very least, linear epitopes in a denatured polypeptide (e.g., in Western blotting).

[0188] Epitope-bearing polypeptides of the present invention can be used to induce antibodies according to methods well known in the art including, but not limited to, in vivo immunization, in vitro immunization, and phage display methods. See, e.g., Sutcliffe et al., supra; Wilson et al., supra; and Bittle et al., supra). If in vivo immunization is used, animals can be immunized with free peptide of appropriate size; however, the anti-peptide antibody titer can be boosted by coupling the peptide to a macromolecular carrier, such as keyhole limpet hemacyanin (KLH), or tetanus toxoid (TT). For instance, peptides containing cysteine residues can be coupled to a carrier using a linker such as maleimidobenzoyl-N-hydroxysuccinimide ester (MBS), while other peptides may be coupled to carriers using a more general linking agent, such as glutaraldehyde.

[0189] Peptides containing epitopes can also be synthesized as multiple antigen peptides (MAPs), first described by J. P. Tam et al. (Biomed. Pept., Proteins, Nucleic Acids, 1(3):123-132 (1995)) and Calvo et al. (J. Immunol., 150(4):1403-1412 (1993)), which are hereby incorporated by reference in their entirety herein. MAPs contain multiple copies of a specific peptide attached to a non-immunogenic lysine core. MAP peptides usually contain four or eight copies of the peptide, which are often referred to as MAP4 or MAP8 peptides. By way of non-limiting example, MAPs can be synthesized onto a lysine core matrix attached to a polyethylene glycol-polystyrene (PEG-PS) support. The peptide of interest is synthesized onto the lysine residues using 9-fluorenylmethoxycarbonyl (Fmoc) chemistry. For example, Applied Biosystems (Foster City, Calif.) offers commercially available MAP resins, such as, for example, the Fmoc Resin 4 Branch and the Fmoc Resin 8 Branch which can be used to synthesize MAPs. Cleavage of MAPs from the resin is performed with standard trifloroacetic acid (TFA)-based cocktails known in the art. Purification of MAPs, except for desalting, is not generally necessary. MAP peptides can be used in immunizing vaccines which elicit antibodies that recognize both the MAP and the native protein from which the peptide was derived.

[0190] Epitope-bearing peptides of the invention can also be incorporated into a coat protein of a virus, which can then be used as an immunogen or a vaccine with which to immunize animals, including humans, in order stimulate the production of anti-epitope antibodies. For example, the V3 loop of the gp120 glycoprotein of the human immunodeficiency virus type 1 (HIV-1) has been engineered to be expressed on the surface of rhinovirus. Immunization with rhinovirus displaying the V3 loop peptide yielded apparently effective mimics of the HIV-1 immunogens (as measured by their ability to be neutralized by anti-HIV-1 antibodies as well as by their ability to elicit the production of antibodies capable of neutralizing HIV-1 in cell culture). This techniques of using engineered viral particles as immunogens is described in more detail in Smith et al., Behring Inst Mitt Feb, (98):229-239 (1997); Smith et al., J. Virol., 72:651-659 (1998); and Zhang et al., Biol. Chem., 380:365-374 (1999)), which are hereby incorporated by reference herein in their entireties.

[0191] Moreover, polypeptides or peptides containing epitopes according to the present invention can be modified, for example, by the addition of amino acids at the amino- and/or carboxy-terminus of the peptide. Such modifications are performed, for example, to alter the conformation of the epitope bearing polypeptide such that the epitope will have a conformation more closely related to the structure of the epitope in the native protein. An example of a modified epitope-bearing polypeptide of the invention is a polypeptide in which one or more cysteine residues have been added to the polypeptide to allow for the formation of a disulfide bond between two cysteines, thus resulting in a stable loop structure of the epitope-bearing polypeptide under non-reducing conditions. Disulfide bonds can form between a cysteine residue added to the polypeptide and a cysteine residue of the naturally-occurring epitope, or between two cysteines which have both been added to the naturally-occurring epitope-bearing polypeptide.

[0192] In addition, it is possible to modify one or more amino acid residues of the naturally-occurring epitope-bearing polypeptide by substitution with cysteines to promote the formation of disulfide bonded loop structures. Cyclic thioether molecules of synthetic peptides can be routinely generated using techniques known in the art, e.g., as described in PCT publication WO 97/46251, incorporated in its entirety by reference herein. Other modifications of epitope-bearing polypeptides contemplated by this invention include biotinylation.

[0193] For the production of antibodies in vivo, host animals, such as rabbits, rats, mice, sheep, or goats, are immunized with either free or carrier-coupled peptides or MAP peptides, for example, by intraperitoneal and/or intradermal injection. Injection material is typically an emulsion containing about 100 μg of peptide or carrier protein and Freund's adjuvant, or any other adjuvant known for stimulating an immune response. Several booster injections may be needed, for instance, at intervals of about two weeks, to provide a useful titer of anti-peptide antibody which can be detected, for example, by ELISA assay using free peptide adsorbed to a solid surface. The titer of anti-peptide antibodies in serum from an immunized animal can be increased by selection of anti-peptide antibodies, e.g., by adsorption of the peptide onto a solid support and elution of the selected antibodies according to methods well known in the art.

[0194] As one having skill in the art will appreciate, and as discussed above, the tyrosine kinase biomarker polypeptides of the present invention, which include the following: e.g., members of the Src family of tyrosine kinases, such as Src, Fgr, Fyn, Yes, Blk, Hck, Lck and Lyn, as well as other protein tyrosine kinases, including, Bcr-abl, Jak, PDGFR, c-kit and Eph receptors, and which comprise an immunogenic or antigenic epitope, can be fused to other polypeptide sequences. For example, the polypeptides of the present invention can be fused with the constant domain of immunoglobulins (IgA, IgE, IgG, IgD, or IgM), or portions thereof, e.g., CH1, CH2, CH3, or any combination thereof, and portions thereof, or with albumin (including, but not limited to, recombinant human albumin, or fragments or variants thereof (see, e.g., U.S. Pat. No. 5,876,969; EP Patent No. 0413622; and U.S. Pat. No. 5,766,883, incorporated by reference in their entirety herein), thereby resulting in chimeric polypeptides. Such fusion proteins may facilitate purification and may increase half-life in vivo. This has been shown for chimeric proteins containing the first two domains of the human CD4-polypeptide and various domains of the constant regions of the heavy or light chains of mammalian immunoglobulins. (see, e.g., Traunecker et al., Nature, 331:84-86 (1988)).

[0195] Enhanced delivery of an antigen across the epithelial barrier to the immune system has been demonstrated for antigens (e.g., insulin) conjugated to an FcRn binding partner, such as IgG or Fc fragments (see, e.g., WO 96/22024 and WO 99/04813). IgG fusion proteins that have a disulfide-linked dimeric structure due to the IgG portion disulfide bonds have also been found to be more efficient in binding and neutralizing other molecules than are monomeric polypeptides, or fragments thereof, alone. (See, e.g., Fountoulakis et al., J. Biochem., 270:3958-3964 (1995)).

[0196] Nucleic acids encoding epitopes can also be recombined with a polynucleotide of interest as an epitope tag (e.g., the hemagglutinin (“HA”) tag or flag tag) to aid in detection and purification of the expressed polypeptide. For example, a system for the ready purification of non-denatured fusion proteins expressed in human cell lines has been described by Janknecht et al., (Proc. Natl. Acad. Sci. USA, 88:8972-8976 (1991)). In this system, the polynucleotide of interest is subcloned into a vaccinia recombination plasmid such that the open reading frame of the polynucleotide is translationally fused to an amino-terminal tag having six histidine residues. The tag serves as a matrix binding domain for the fusion protein. Extracts from cells infected with the recombinant vaccinia virus are loaded onto an Ni²⁺ nitriloacetic acid-agarose column and histidine-tagged proteins are selectively eluted with imidazole-containing buffers.

[0197] Additional fusion proteins of the invention can be generated by employing the techniques of gene-shuffling, motif-shuffling, exon-shuffling, and/or codon-shuffling (collectively referred to as “DNA shuffling”). DNA shuffling can be employed to modulate the activities of polypeptides of the invention; such methods can be used to generate polypeptides with altered activity, as well as agonists and antagonists of the polypeptides. See, generally, U.S. Pat. Nos. 5,605,793; 5,811,238; 5,830,721; 5,834,252; and 5,837,458, and Patten et al., Curr. Opinion Biotechnol., 8:724-733 (1997); Harayama, Trends Biotechnol., 16(2):76-82 (1998); Hansson et al., J. Mol. Biol., 287:265-276 (1999); and Lorenzo and Blasco, Biotechniques, 24(2):308-313 (1998), the contents of each of which are hereby incorporated by reference in its entirety.

[0198] In an embodiment of the invention, alteration of polynucleotides corresponding to one or more of the src biomarker polynucleotide sequences as set forth in Table 2, and the polypeptides encoded by these polynucleotides, can be achieved by DNA shuffling. DNA shuffling involves the assembly of two or more DNA segments by homologous or site-specific recombination to generate variation in the polynucleotide sequence. In another embodiment, polynucleotides of the invention, or their encoded polypeptides, may be altered by being subjected to random mutapolynucleotidesis by error-prone PCR, random nucleotide insertion, or other methods, prior to recombination. In another embodiment, one or more components, motifs, sections, parts, domains, fragments, etc., of a polynucleotide encoding a polypeptide of this invention may be recombined with one or more components, motifs, sections, parts, domains, fragments, etc. of one or more heterologous molecules.

[0199] Another aspect of the present invention relates to antibodies and T-cell antigen receptors (TCRs), which immunospecifically bind to a polypeptide, polypeptide fragment, or variant one or more of the src biomarker amino acid sequences as set forth in Table 2, and/or an epitope thereof, of the present invention (as determined by immunoassays well known in the art for assaying specific antibody-antigen binding).

[0200] A bispecific or bifunctional antibody is an artificial hybrid antibody having two different heavy/light chain pairs and two different binding sites. Bispecific antibodies can be produced by a variety of methods, including fusion of hybridomas or linking of Fab′ fragments. (See, e.g., Songsivilai & Lachmann, Clin. Exp. Immunol., 79:315-321 (1990); Kostelny et al., J. Immunol., 148:1547-1553 (1992)). In addition, bispecific antibodies can be formed as “diabodies” (See, Holliger et al., Proc. Natl. Acad. Sci. USA, 90:6444-6448 (1993)), or “Janusins” (See, Traunecker et al., EMBO J., 10:3655-3659 (1991) and Traunecker et al., Int. J. Cancer Suppl. 7:51-52 (1992)).

[0201] Antibodies of the invention include, but are not limited to, polyclonal, monoclonal, multispecific, human, humanized or chimeric antibodies, single chain antibodies, Fab fragments, F(ab′) fragments, fragments produced by a Fab expression library, anti-idiotypic (anti-Id) antibodies (including, e.g., anti-Id antibodies to antibodies of the invention), intracellularly made antibodies (i.e., intrabodies), and epitope-binding fragments of any of the above. The term “antibody”, as used herein, refers to immunoglobulin molecules and immunologically active portions or fragments of immunoglobulin molecules, i.e., molecules that contain an antigen binding site that immunospecifically binds an antigen. The immunoglobulin molecules of the invention can be of any type (e.g., IgG, IgE, IgM, IgD, IgA and IgY), class or subclass (e.g., IgG1, IgG2, IgG3, IgG4, IgA1 and IgA2) of immunoglobulin molecule. Preferably, immunoglobulin is an IgG1, an IgG2, or an IgG4 isotype.

[0202] Immunoglobulins may have both a heavy and a light chain. An array of IgG, IgE, IgM, IgD, IgA, and IgY heavy chains can be paired with a light chain of the kappa or lambda types. Most preferably, the antibodies of the present invention are human antigen-binding antibodies and antibody fragments and include, but are not limited to, Fab, Fab′ F(ab′)2, Fd, single-chain Fvs (scFv), single-chain antibodies, disulfide-linked Fvs (sdFv) and fragments comprising either a V_{L} or V_{H} domain. Antigen-binding antibody fragments, including single-chain antibodies, can comprise the variable region(s) alone or in combination with the entirety or a portion of the following: hinge region, and CH1, CH2, and CH3 domains. Also included in connection with the invention are antigen-binding fragments comprising any combination of variable region(s) with a hinge region, and CH1, CH2, and CH3 domains. The antibodies of the invention can be from any animal origin including birds and mammals. Preferably, the antibodies are of human, murine (e.g., mouse and rat), donkey, sheep, rabbit, goat, guinea pig, camel, horse, or chicken origin. As used herein, “human” antibodies include antibodies having the amino acid sequence of a human immunoglobulin and include antibodies isolated from human immunoglobulin libraries or from animals transgenic for one or more human immunoglobulin and that do not express endogenous immunoglobulins, as described infra and, for example, in U.S. Pat. No. 5,939,598.

[0203] The antibodies of the present invention can be monospecific, bispecific, trispecific, or of greater multispecificity. Multispecific antibodies can be specific for different epitopes of a polypeptide of the present invention, or can be specific for both a polypeptide of the present invention, and a heterologous epitope, such as a heterologous polypeptide or solid support material. (See, e.g., WO 93/17715; WO 92/08802; WO 91/00360; WO 92/05793; Tutt et al., J. Immunol., 147:60-69 (1991); U.S. Pat. Nos. 4,474,893; 4,714,681; 4,925,648; 5,573,920; 5,601,819; and Kostelny et al., J. Immunol., 148:1547-1553 (1992)).

[0204] Antibodies of the present invention can be described or specified in terms of the epitope(s) or portion(s) of a polypeptide of the present invention which they recognize or specifically bind. The epitope(s) or polypeptide portion(s) can be specified, e.g., by N-terminal and C-terminal positions, by size in contiguous amino acid residues, or as presented in the sequences defined in Table 2 herein. Further included in accordance with the present invention are antibodies which bind to polypeptides encoded by polynucleotides which hybridize to a polynucleotide of the present invention under stringent, or moderately stringent, hybridization conditions as described herein.

[0205] The antibodies of the invention (including molecules comprising, or alternatively consisting of, antibody fragments or variants thereof) can bind immunospecifically to a polypeptide or polypeptide fragment or to a variant human protein tyrosine kinase biomarker of the invention, e.g., the Src biomarker proteins as set forth in Table 2, and/or monkey src biomarker protein.

[0206] By way of non-limiting example, an antibody can be considered to bind to a first antigen preferentially if it binds to the first antigen with a dissociation constant (Kd) that is less than the antibody's Kd for the second antigen. In another non-limiting embodiment, an antibody can be considered to bind to a first antigen preferentially if it binds to the first antigen with an affinity that is at least one order of magnitude less than the antibody's Ka for the second antigen. In another non-limiting embodiment, an antibody can be considered to bind to a first antigen preferentially if it binds to the first antigen with an affinity that is at least two orders of magnitude less than the antibody's Kd for the second antigen.

[0207] In another nonlimiting embodiment, an antibody may be considered to bind to a first antigen preferentially if it binds to the first antigen with an off rate (koff) that is less than the antibody's koff for the second antigen. In another nonlimiting embodiment, an antibody can be considered to bind to a first antigen preferentially if it binds to the first antigen with an affinity that is at least one order of magnitude less than the antibody's koff for the second antigen. In another nonlimiting embodiment, an antibody can be considered to bind to a first antigen preferentially if it binds to the first antigen with an affinity that is at least two orders of magnitude less than the antibody's koff for the second antigen.

[0208] Antibodies of the present invention can also be described or specified in terms of their binding affinity to a tyrosine kinase biomarker polypeptide of the present invention, e.g., members of the Src family of tyrosine kinases, for example, Src, Fgr, Fyn, Yes, Blk, Hck, Lck and Lyn, as well as other protein tyrosine kinases, including, Bcr-abl, Jak, PDGFR, c-kit and Eph receptors. Preferred binding affinities include those with a dissociation constant or Kd of less than 5×10⁻² M, 1×10⁻² M, 5×10⁻³ M, 1×10⁻³ M, 5×10⁻⁴ M, or 1×10⁻⁴ M. More preferred binding affinities include those with a dissociation constant or Kd less than 5×10⁻⁵ M, 1×10⁻⁵ M, 5×10⁻⁶ M, 1×10⁻⁶ M, 5×10⁻⁷ M, 1×10⁻⁷ M, 5×10⁻⁸ M, or 1×10⁻⁸ M. Even more preferred antibody binding affinities include those with a dissociation constant or Kd of less than 5×10⁻⁹ M, 1×10⁻⁹ M, 5×10⁻¹⁰ M, 1×10⁻¹⁰ M, 5×10⁻¹¹ M, 1×10⁻¹¹ M, 5×10⁻¹² M, 1×10⁻¹² M, 5×10⁻¹³ M, 1×10⁻¹³ M, 5×10⁻¹⁴ M, 1×10⁻¹⁴ M, 5×10⁻¹⁵ M, or 1×10⁻¹⁵ M.

[0209] In specific embodiments, antibodies of the invention bind to the protein tyrosine kinase biomarker polypeptides, or fragments, or variants thereof, with an off rate (koff) of less than or equal to about 5×10⁻² sec⁻¹, 1×10⁻² sec⁻¹, 5×10⁻³ sec⁻¹, or 1×10⁻³ sec⁻¹. More preferably, antibodies of the invention bind to src biomarker protein polypeptides or fragments or variants thereof with an off rate (koff) of less than or equal to about 5×10⁻⁴ sec⁻¹, 1×10⁻⁴ sec⁻¹, 5×10⁻⁵ sec⁻¹, 1×10⁻⁵ sec⁻¹, 5×10⁻⁶ sec⁻¹, 1×10⁻⁶ sec⁻¹, 5×10⁻⁷ sec⁻¹, or 1×10⁻⁷ sec⁻¹.

[0210] In other embodiments, antibodies of the invention bind to protein tyrosine kinase biomarker polypeptides or fragments or variants thereof with an on rate (kon) of greater than or equal to 1×10³ M⁻¹ sec⁻¹, 5×10³ M⁻¹ sec⁻¹, 1×10⁴ M⁻¹ sec⁻¹, or 5×10⁴ M⁻¹ sec⁻¹. More preferably, antibodies of the invention bind to protein tyrosine kinase biomarker polypeptides or fragments or variants thereof with an on rate greater than or equal to 1×10⁵ M⁻¹ sec⁻¹, 5×10⁵ M⁻¹ sec⁻¹, 1×10⁶ M⁻¹ sec⁻¹, 5×10⁻⁶ M⁻¹ sec⁻¹, or 1×10⁻⁷ M⁻¹ sec⁻¹.

[0211] The present invention also provides antibodies that competitively inhibit the binding of an antibody to an epitope of the invention as determined by any method known in the art for determining competitive binding, for example, the immunoassays as described herein. In preferred embodiments, the antibody competitively inhibits binding to an epitope by at least 95%, at least 90%, at least 85%, at least 80%, at least 75%, at least 70%, at least 60%, or at least 50%.

[0212] Antibodies of the present invention can act as agonists or antagonists of the protein tyrosine kinase biomarker polypeptides of the present invention. For example, the present invention includes antibodies which disrupt receptor/ligand interactions with polypeptides of the invention either partially or fully. The invention includes both receptor-specific antibodies and ligand-specific antibodies. The invention also includes receptor-specific antibodies which do not prevent ligand binding, but do prevent receptor activation. Receptor activation (i.e., signaling) can be determined by techniques described herein or as otherwise known in the art. For example, receptor activation can be determined by detecting the phosphorylation (e.g., on tyrosine or serine/threonine) of the receptor or its substrate by immunoprecipitation followed by Western Blot analysis. In specific embodiments, antibodies are provided that inhibit ligand activity or receptor activity by at least 95%, at least 90%, at least 85%, at least 80%, at least 75%, at least 70%, at least 60%, or at least 50% of the activity in the absence of the antibody.

[0213] In another embodiment of the present invention, antibodies that immunospecifically bind to a protein tyrosine kinase biomarker, or a fragment or variant thereof, comprise a polypeptide having the amino acid sequence of any one of the heavy chains expressed by an anti-protein tyrosine kinase biomarker antibody-expressing cell line of the invention, and/or any one of the light chains expressed by an anti-protein tyrosine kinase biomarker antibody-expressing cell line of the invention.

[0214] In another embodiment of the present invention, antibodies that immunospecifically bind to a tyrosine kinase biomarker protein or a fragment or variant thereof, comprise a polypeptide having the amino acid sequence of any one of the V_{H} domains of a heavy chain expressed by an anti-protein tyrosine kinase biomarker antibody-expressing cell line, and/or any one of the V_{L} domains of a light chain expressed by an anti-protein tyrosine kinase biomarker antibody-expressing cell line. In preferred embodiments, antibodies of the present invention comprise the amino acid sequence of a V_{H} domain and V_{L} domain expressed by a single anti-protein tyrosine kinase biomarker protein antibody-expressing cell line. In alternative embodiments, antibodies of the present invention comprise the amino acid sequence of a V_{H} domain and a V_{L} domain expressed by two different anti-protein tyrosine kinase biomarker antibody-expressing cell lines.

[0215] Molecules comprising, or alternatively consisting of, antibody fragments or variants of the V_{H} and/or V_{L} domains expressed by an anti-protein tyrosine kinase biomarker antibody-expressing cell line that immunospecifically bind to a tyrosine kinase biomarker protein, e.g., Src tyrosine kinase, are also encompassed by the invention, as are nucleic acid molecules encoding these V_{H} and V_{L} domains, molecules, fragments and/or variants.

[0216] The present invention also provides antibodies that immunospecifically bind to a polypeptide, or polypeptide fragment or variant of a tyrosine kinase biomarker protein, e.g., a Src kinase biomarker protein, wherein such antibodies comprise, or alternatively consist of, a polypeptide having an amino acid sequence of any one, two, three, or more of the V_{H} CDRs contained in a heavy chain expressed by one or more anti-tyrosine kinase biomarker protein antibody expressing cell lines. In particular, the invention provides antibodies that immunospecifically bind to a tyrosine kinase biomarker protein, comprising, or alternatively consisting of, a polypeptide having the amino acid sequence of a V_{H} CDR1 contained in a heavy chain expressed by one or more anti-tyrosine kinase biomarker protein antibody expressing cell lines. In another embodiment, antibodies that immunospecifically bind to a tyrosine kinase biomarker protein, comprise, or alternatively consist of, a polypeptide having the amino acid sequence of a V_{H} CDR2 contained in a heavy chain expressed by one or more anti-tyrosine kinase biomarker protein antibody expressing cell lines. In a preferred embodiment, antibodies that immunospecifically bind to a tyrosine kinase biomarker protein, comprise, or alternatively consist of, a polypeptide having the amino acid sequence of a V_{H} CDR3 contained in a heavy chain expressed by one or more anti-tyrosine kinase biomarker protein antibody expressing cell line of the invention. Molecules comprising, or alternatively consisting of, these antibodies or antibody fragments or variants thereof that immunospecifically bind to a tyrosine kinase biomarker protein or a tyrosine kinase biomarker protein fragment or variant thereof are also encompassed by the invention, as are nucleic acid molecules encoding these antibodies, molecules, fragments and/or variants.

[0217] The present invention also provides antibodies that immunospecifically bind to a polypeptide, or polypeptide fragment or variant of a tyrosine kinase biomarker protein, e.g., a Src kinase biomarker protein, wherein the antibodies comprise, or alternatively consist of, a polypeptide having an amino acid sequence of any one, two, three, or more of the V_{L} CDRs contained in a heavy chain expressed by one or more anti-tyrosine kinase biomarker protein antibody expressing cell lines of the invention. In particular, the invention provides antibodies that immunospecifically bind to a tyrosine kinase biomarker protein, comprising, or alternatively consisting of, a polypeptide having the amino acid sequence of a V_{L} CDR1 contained in a heavy chain expressed by one or more anti-tyrosine kinase biomarker protein antibody-expressing cell lines of the invention. In another embodiment, antibodies that immunospecifically bind to a src biomarker protein, comprise, or alternatively consist of, a polypeptide having the amino acid sequence of a V_{L} CDR2 contained in a heavy chain expressed by one or more anti-tyrosine kinase biomarker protein antibody-expressing cell lines of the invention. In a preferred embodiment, antibodies that immunospecifically bind to a tyrosine kinase biomarker protein, comprise, or alternatively consist of, a polypeptide having the amino acid sequence of a V_{L} CDR3 contained in a heavy chain expressed by one or more anti-tyrosine kinase biomarker protein antibody-expressing cell lines of the invention. Molecules comprising, or alternatively consisting of, these antibodies, or antibody fragments or variants thereof, that immunospecifically bind to a tyrosine kinase biomarker protein or a tyrosine kinase biomarker protein fragment or variant thereof are also encompassed by the invention, as are nucleic acid molecules encoding these antibodies, molecules, fragments and/or variants.

[0218] The present invention also provides antibodies (including molecules comprising, or alternatively consisting of, antibody fragments or variants) that immunospecifically bind to a tyrosine kinase biomarker protein, polypeptide or polypeptide fragment or variant of a tyrosine kinase biomarker protein, e.g., Src tyrosine kinase, wherein the antibodies comprise, or alternatively consist of, one, two, three, or more V_{H} CDRs, and one, two, three or more V_{L} CDRs, as contained in a heavy chain or light chain expressed by one or more anti-tyrosine kinase biomarker protein antibody-expressing cell lines of the invention. In particular, the invention provides antibodies that immunospecifically bind to a polypeptide or polypeptide fragment or variant of a tyrosine kinase biomarker protein, wherein the antibodies comprise, or alternatively consist of, a V_{H} CDR1 and a V_{L} CDR1, a V_{H} CDR1 and a V_{L} CDR2, a V_{H} CDR1 and a V_{L} CDR3, a V_{H} CDR2 and a V_{L} CDR1, VH CDR2 and V_{L} CDR2, a V_{H} CDR2 and a V_{L} CDR3, a V_{H} CDR3 and a V_{H} CDR1, a V_{H} CDR3 and a V_{L} CDR2, a V_{H} CDR3 and a V_{L} CDR3, or any combination thereof, of the V_{H} CDRs and V_{L} CDRs contained in a heavy chain or light chain immunoglobulin molecule expressed by one or more anti-tyrosine kinase biomarker protein antibody-expressing cell lines of the invention. In a preferred embodiment, one or more of these combinations are from a single anti-tyrosine kinase biomarker protein antibody-expressing cell line of the invention. Molecules comprising, or alternatively consisting of, fragments or variants of these antibodies that immunospecifically bind to the tyrosine kinase biomarker proteins are also encompassed by the invention, as are nucleic acid molecules encoding these antibodies, molecules, fragments or variants.

[0219] The present invention also provides nucleic acid molecules, generally isolated, encoding an antibody of the invention (including molecules comprising, or alternatively consisting of, antibody fragments or variants thereof). In a specific embodiment, a nucleic acid molecule of the invention encodes an antibody (including molecules comprising, or alternatively consisting of, antibody fragments or variants thereof), comprising, or alternatively consisting of, a V_{H} domain having an amino acid sequence of any one of the V_{H} domains of a heavy chain expressed by an anti-tyrosine kinase biomarker protein antibody-expressing cell line of the invention and a V_{L} domain having an amino acid sequence of a light chain expressed by an anti-tyrosine kinase biomarker protein antibody-expressing cell line of the invention. In another embodiment, a nucleic acid molecule of the invention encodes an antibody (including molecules comprising, or alternatively consisting of, antibody fragments or variants thereof), comprising, or alternatively consisting of, a V_{H} domain having an amino acid sequence of any one of the V_{H} domains of a heavy chain expressed by an anti-tyrosine kinase biomarker protein antibody-expressing cell line of the invention, or a V_{L} domain having an amino acid sequence of a light chain expressed by an anti-tyrosine kinase biomarker protein antibody-expressing cell line of the invention.

[0220] The present invention also provides antibodies that comprise, or alternatively consist of, variants (including derivatives) of the antibody molecules (e.g., the V_{H} domains and/or V_{L} domains) described herein, which antibodies immunospecifically bind to a tyrosine kinase biomarker protein or fragment or variant thereof, e.g., a Src tyrosine kinase polypeptide.

[0221] Standard techniques known to those of skill in the art can be used to introduce mutations in the nucleotide sequence encoding a molecule of the invention, including, for example, site-directed mutapolynucleotidesis and PCR-mediated mutapolynucleotidesis which result in amino acid substitutions. Preferably the molecules are immunoglobulin molecules. Also preferably, the variants (including derivatives) encode less than 50 amino acid substitutions, less than 40 amino acid substitutions, less than 30 amino acid substitutions, less than 25 amino acid substitutions, less than 20 amino acid substitutions, less than 15 amino acid substitutions, less than 10 amino acid substitutions, less than 5 amino acid substitutions, less than 4 amino acid substitutions, less than 3 amino acid substitutions, or less than 2 amino acid substitutions, relative to the reference V_{H} domain, V_{H} CDR1, V_{H} CDR2, V_{H} CDR3, V_{L} domain, V_{L} CDR1, V_{L} CDR2, or V_{L} CDR3.

[0222] A “conservative amino acid substitution” is one in which the amino acid residue is replaced with an amino acid residue having a side chain with a similar charge. Families of amino acid residues having side chains with similar charges have been defined in the art. These families include amino acids with basic side chains (e.g., lysine, arginine, histidine), acidic side chains (e.g., aspartic acid, glutamic acid), uncharged polar side chains (e.g., glycine, asparagine, glutamine, serine, threonine, tyrosine, cysteine), nonpolar side chains (e.g., alanine, valine, leucine, isoleucine, proline, phenylalanine, methionine, tryptophan), beta-branched side chains (e.g., threonine, valine, isoleucine) and aromatic side chains (e.g., tyrosine, phenylalanine, tryptophan, histidine). Alternatively, mutations can be introduced randomly along all or part of the coding sequence, such as by saturation mutapolynucleotidesis. The resultant mutants can be screened for biological activity to identify mutants that retain activity.

[0223] For example, it is possible to introduce mutations only in framework regions or only in CDR regions of an antibody molecule. Introduced mutations can be silent or neutral missense mutations, i.e., have no, or little, effect on an antibody's ability to bind antigen. These types of mutations can be useful to optimize codon usage, or to improve hybridoma antibody production. Alternatively, non-neutral missense mutations can alter an antibody's ability to bind antigen. The location of most silent and neutral missense mutations is likely to be in the framework regions, while the location of most non-neutral missense mutations is likely to be in the CDRs, although this is not an absolute requirement. One of skill in the art is able to design and test mutant molecules with desired properties, such as no alteration in antigen binding activity or alteration in binding activity (e.g., improvements in antigen binding activity or change in antibody specificity). Following mutapolynucleotidesis, the encoded protein may routinely be expressed and the functional and/or biological activity of the encoded protein can be determined using techniques described herein or by routinely modifying techniques known and practiced in the art.

[0224] In a specific embodiment, an antibody of the invention (including a molecule comprising, or alternatively consisting of, an antibody fragment or variant thereof), that immunospecifically binds to protein tyrosine kinase biomarker polypeptides or fragments or variants thereof, comprises, or alternatively consists of, an amino acid sequence encoded by a nucleotide sequence that hybridizes to a nucleotide sequence that is complementary to that encoding one of the V_{H} or V_{L} domains expressed by one or more anti-tyrosine kinase biomarker protein antibody-expressing cell lines of the invention, preferably under stringent conditions, e.g., hybridization to filter-bound DNA in 6× sodium chloride/sodium citrate (SSC) at about 45° C. followed by one or more washes in 0.2×SSC/0.1% SDS at about 50° C.-65° C., preferably under highly stringent conditions, e.g., hybridization to filter-bound nucleic acid in 6×SSC at about 45° C. followed by one or more washes in 0.1×SSC/0.2% SDS at about 68° C., or under other stringent hybridization conditions which are known to those of skill in the art (see, for example, Ausubel, F. M. et al., eds., Current Protocols in Molecular Biology, Vol. 1, Green Publishing Associates, Inc. and John Wiley & Sons, Inc., New York, pp. 6.3.1-6.3.6 and 2.10.3 (1989)). Nucleic acid molecules encoding these antibodies are also encompassed by the invention.

[0225] It is well known within the art that polypeptides, or fragments or variants thereof, with similar amino acid sequences often have similar structure and many of the same biological activities. Thus, in one embodiment, an antibody (including a molecule comprising, or alternatively consisting of, an antibody fragment or variant thereof), that immunospecifically binds to a protein tyrosine kinase biomarker polypeptide or fragments or variants of a tyrosine kinase biomarker polypeptide, comprises, or alternatively consists of, a V_{H} domain having an amino acid sequence that is at least 35%, at least 40%, at least 45%, at least 50%, at least 55%, at least 60%, at least 65%, at least 70%, at least 75%, at least 80%, at least 85%, at least 90%, at least 95%, or at least 99% identical to the amino acid sequence of a V_{H} domain of a heavy chain expressed by an anti-tyrosine kinase biomarker protein antibody-expressing cell line of the invention.

[0226] In another embodiment, an antibody (including a molecule comprising, or alternatively consisting of, an antibody fragment or variant thereof), that immunospecifically binds to a tyrosine kinase biomarker polypeptide, or fragments or variants of a tyrosine kinase biomarker protein polypeptide, comprises, or alternatively consists of, a V_{L} domain having an amino acid sequence that is at least 35%, at least 40%, at least 45%, at least 50%, at least 55%, at least 60%, at least 65%, at least 70%, at least 75%, at least 80%, at least 85%, at least 90%, at least 95%, or at least 99% identical to the amino acid sequence of a V_{L} domain of a light chain expressed by an anti-tyrosine kinase biomarker protein antibody-expressing cell line of the invention.

[0227] The present invention also provides antibodies (including molecules comprising, or alternatively consisting of, antibody fragments or variants thereof), that down-regulate the cell-surface expression of a tyrosine kinase biomarker protein, as determined by any method known in the art such as, for example, FACS analysis or immunofluorescence assays. By way of a non-limiting hypothesis, such down-regulation can be the result of antibody-induced internalization of a tyrosine kinase biomarker protein. Such antibodies can comprise, or alternatively consist of, a portion (e.g., V_{H} CDR1, V_{H} CDR2, V_{H} CDR3, V_{L} CDR1, V_{L} CDR2, or V_{L} CDR3) of a V_{H} or V_{L} domain having an amino acid sequence of an antibody of the invention, or a fragment or variant thereof.

[0228] In another embodiment, an antibody that down-regulates the cell-surface expression of a tyrosine kinase biomarker protein comprises, or alternatively consists of, a polypeptide having the amino acid sequence of a V_{H} domain of an antibody of the invention, or a fragment or variant thereof and a V_{L} domain of an antibody of the invention, or a fragment or variant thereof. In another embodiment, an antibody that down-regulates the cell-surface expression of a tyrosine kinase biomarker protein comprises, or alternatively consists of, a polypeptide having the amino acid sequence of a V_{H} domain and a V_{L} domain from a single antibody (or scFv or Fab fragment) of the invention, or fragments or variants thereof. In another embodiment, an antibody that down-regulates the cell-surface expression of a tyrosine kinase biomarker protein comprises, or alternatively consists of, a polypeptide having the amino acid sequence of a V_{H} domain of an antibody of the invention, or a fragment or variant thereof. In another embodiment, an antibody that down-regulates the cell-surface expression of a tyrosine kinase biomarker protein comprises, or alternatively consists of, a polypeptide having the amino acid sequence of a V_{L} domain of an antibody of the invention, or a fragment or variant thereof.

[0229] In a preferred embodiment, an antibody that down-regulates the cell-surface expression of a tyrosine kinase biomarker protein comprises, or alternatively consists of, a polypeptide having the amino acid sequence of a V_{H} CDR3 of an antibody of the invention, or a fragment or variant thereof. In another preferred embodiment, an antibody that down-regulates the cell-surface expression of a tyrosine kinase biomarker protein comprises, or alternatively consists of, a polypeptide having the amino acid sequence of a V_{L} CDR3 of an antibody of the invention, or a fragment or variant thereof. Nucleic acid molecules encoding these antibodies are also encompassed by the invention.

[0230] In another preferred embodiment, an antibody that enhances the activity of a tyrosine kinase biomarker protein, or a fragment or variant thereof, comprises, or alternatively consists of, a polypeptide having the amino acid sequence of a V_{L} CDR3 of an antibody of the invention, or a fragment or variant thereof. Nucleic acid molecules encoding these antibodies are also encompassed by the invention.

[0231] As nonlimiting examples, antibodies of the present invention can be used to purify, detect, and target the protein tyrosine kinase polypeptides of the present invention, including both in vitro and in vivo diagnostic, detection, screening, and/or therapeutic methods. For example, the antibodies have been used in immunoassays for qualitatively and quantitatively measuring levels of src biomarker polypeptides in biological samples. (See, e.g., Harlow et al., Antibodies: A Laboratory Manual, 2nd Ed., Cold Spring Harbor Laboratory Press (1988), which is incorporated by reference herein in its entirety).

[0232] By way of another nonlimiting example, antibodies of the invention can be administered to individuals as a form of passive immunization. Alternatively, antibodies of the present invention can be used for epitope mapping to identify the epitope(s) that are bound by the antibody. Epitopes identified in this way can, in turn, for example, be used as vaccine candidates, i.e., to immunize an individual to elicit antibodies against the naturally-occurring forms of one or more tyrosine kinase biomarker proteins.

[0233] As discussed in more detail below, the antibodies of the present invention can be used either alone or in combination with other compositions. The antibodies can further be recombinantly fused to a heterologous polypeptide at the N- or C-terminus, or chemically conjugated (including covalent and non-covalent conjugations) to polypeptides or other compositions. For example, antibodies of the present invention can be recombinantly fused or conjugated to molecules that are useful as labels in detection assays and to effector molecules such as heterologous polypeptides, drugs, radionuclides, or toxins. See, e.g., PCT publications WO 92/08495; WO 91/14438; WO 89/12624; U.S. Pat. No. 5,314,995 and EP 396,387.

[0234] The antibodies of the invention include derivatives that are modified, i.e., by the covalent attachment of any type of molecule to the antibody. For example, without limitation, the antibody derivatives include antibodies that have been modified, e.g., by glycosylation, acetylation, pegylation, phosphorylation, amidation, derivatization by known protecting/blocking groups, proteolytic cleavage, linkage to a cellular ligand or other protein, etc. Any of numerous chemical modifications can be carried out by known techniques, including, but not limited to, specific chemical cleavage, acetylation, formylation, metabolic synthesis of tunicamycin, and the like. In addition, the antibody derivative can contain one or more non-classical amino acids.

[0235] The antibodies of the present invention can be generated by any suitable method known in the art. Polyclonal antibodies directed against an antigen or immunogen of interest can be produced by various procedures well known in the art. For example, a tyrosine kinase biomarker polypeptide or peptide of the invention can be administered to various host animals as elucidated above to induce the production of sera containing polyclonal antibodies specific for the biomarker antigen. Various adjuvants can also be used to increase the immunological response, depending on the host species; adjuvants include, but are not limited to, Freund's (complete and incomplete), mineral gels such as aluminum hydroxide, surface active substances such as lysolecithin, pluronic polyols, polyanions, peptides, oil emulsions, keyhole limpet hemocyanins, dinitrophenol, and potentially useful human adjuvants such as BCG (bacille Calmette-Guerin) and corynebacterium parvum. Such adjuvants are also well known in the art.

[0236] Monoclonal antibodies can be prepared using a wide variety of techniques known in the art, including the use of hybridoma, recombinant and phage display technologies, or a combination thereof. For example, monoclonal antibodies can be produced using hybridoma techniques as known and practiced in the art and as taught, for example, in Kohler and Milstein, Nature, 256:495-497 (1975); Harlow et al., Antibodies: A Laboratory Manual, 2nd Ed., Cold Spring Harbor Laboratory Press (1988); and Hammerling, et al., Monoclonal Antibodies and T-Cell Hybridomas, Elsevier, N.Y., pp. 563-681 (1981), the contents of which are incorporated herein by reference in their entireties. The term “monoclonal antibody” as used herein is not limited to antibodies produced through hybridoma technology. The term “monoclonal antibody” refers to an antibody that is derived from a single clone, including any eukaryotic, prokaryotic, or phage clone, and does not necessarily refer to the method by which it is produced. Techniques involving continuous cell line cultures can also be used. In addition to the hybridoma technique, other techniques include the trioma technique, the human B-cell hybridoma technique (Kozbor et al., Immunol. Today, 4:72 (1983)), and the EBV-hybridoma technique (Cole et al., Monoclonal Antibodies and Cancer Therapy, Alan R. Liss, Inc., pp. 77-96 (1985)).

[0237] Methods for producing and screening for specific antibodies using hybridoma technology are routine and well known in the art. As a nonlimiting example, mice can be immunized with a tyrosine kinase polypeptide or peptide of the invention, or variant thereof, or with a cell expressing the polypeptide or peptide or variant thereof. Once an immune response is detected, e.g., antibodies specific for the antigen are detected in the sera of immunized mice, the spleen is harvested and splenocytes are isolated. The splenocytes are then fused by well known techniques to any suitable myeloma cells, for example cells from cell line SP2/0 or P3×63-AG8.653 available from the ATCC®. Hybridomas are selected and cloned by limiting dilution techniques. The hybridoma clones are then assayed by methods known in the art to determine and select those cells that secrete antibodies capable of binding to a polypeptide of the invention. Ascites fluid, which generally contains high levels of antibodies, can be generated by immunizing mice with positive hybridoma clones.

[0238] Another well known method for producing both polyclonal and monoclonal human B cell lines is transformation using Epstein Barr Virus (EBV). Protocols for generating EBV-transformed B cell lines are commonly known in the art, such as, for example, the protocol outlined in Chapter 7.22 of Current Protocols in Immunology, Coligan et al., eds., John Wiley & Sons, NY (1994), which is hereby incorporated by reference herein in its entirety. The source of B cells for transformation is commonly human peripheral blood, but B cells for transformation can also be obtained from other sources including, but not limited to, lymph node, tonsil, spleen, tumor tissue, and infected tissues. Tissues are generally prepared as single cell suspensions prior to EBV transformation. In addition, T cells that may be present in the B cell samples can be either physically removed or inactivated (e.g., by treatment with cyclosporin A). The removal of T cells is often advantageous, because T cells from individuals seropositive for anti-EBV antibodies can suppress B cell immortalization by EBV. In general, a sample containing human B cells is innoculated with EBV and cultured for 3-4 weeks. A typical source of EBV is the culture supernatant of the B95-8 cell line (ATCC; VR-1492). Physical signs of EBV transformation can generally be seen toward the end of the 3-4 week culture period.

[0239] By phase-contrast microscopy, transformed cells appear large, clear and “hairy”; they tend to aggregate in tight clusters of cells. Initially, EBV lines are generally polyclonal. However, over prolonged periods of cell culture, EBV lines can become monoclonal as a result of the selective outgrowth of particular B cell clones. Alternatively, polyclonal EBV transformed lines can be subcloned (e.g., by limiting dilution) or fused with a suitable fusion partner and plated at limiting dilution to obtain monoclonal B cell lines. Suitable fusion partners for EBV transformed cell lines include mouse myeloma cell lines (e.g., SP2/0, X63-Ag8.653), heteromyeloma cell lines (human×mouse; e.g., SPAM-8, SBC-H20, and CB-F7), and human cell lines (e.g., GM 1500, SKO-007, RPMI 8226, and KR-4). Thus, the present invention also includes a method of generating polyclonal or monoclonal human antibodies against protein tyrosine kinase polypeptides and peptides of the invention, or fragments thereof, comprising EBV-transformation of human B cells.

[0240] Antibody fragments that recognize specific epitopes can be generated by known techniques. For example, Fab and F(ab′)2 fragments of the invention can be produced by proteolytic cleavage of immunoglobulin molecules, using enzymes such as papain (to produce Fab fragments) or pepsin (to produce F (ab′)2 fragments). F(ab′)2 fragments contain the variable region, the light chain constant region and the CH1 domain of the heavy chain.

[0241] Antibodies encompassed by the present invention can also be generated using various phage display methods known in the art. In phage display methods, functional antibody domains are displayed on the surface of phage particles which carry the polynucleotide sequences encoding them. In a particular embodiment, such phage can be utilized to display antigen binding domains expressed from a repertoire or combinatorial antibody library (e.g., human or murine). Phage expressing an antigen binding domain that binds to the antigen of interest can be selected or identified with antigen, e.g., using labeled antigen or antigen bound or captured onto a solid surface or bead. Phage used in these methods are typically filamentous phage including fd and M13 binding domains expressed from phage with Fab, Fv, or disulfide stabilized antibody domains recombinantly fused to either the phage polynucleotide III or polynucleotide VIII protein. Examples of phage display methods that can be used to make the antibodies of the present invention include those disclosed in Brinkman et al., J. Immunol. Methods, 182:41-50 (1995); Ames et al., J. Immunol. Methods, 184:177-186 (1995); Kettleborough et al., Eur. J. Immunol., 24:952-958 (1994); Persic et al., Gene, 187:9-18 (1997); Burton et al., Advances in Immunology, 57:191-280 (1994); PCT application No. PCT/GB91/01134; PCT publications WO 90/02809; WO 91/10737; WO 92/01047; WO 92/18619; WO 93/11236; WO 95/15982; WO 95/20401; and U.S. Pat. Nos. 5,698,426; 5,223,409; 5,403,484; 5,580,717; 5,427,908; 5,750,753; 5,821,047; 5,571,698; 5,427,908; 5,516,637; 5,780,225; 5,658,727; 5,733,743 and 5,969,108, each of which is incorporated herein by reference in its entirety.

[0242] As described in the above references, after phage selection, the antibody coding regions from the phage can be isolated and used to generate whole antibodies, including human antibodies, or any other desired antigen binding fragment, and expressed in any desired host, including mammalian cells, insect cells, plant cells, yeast, and bacteria, e.g., as described in detail below.

[0243] Examples of techniques that can be used to produce single-chain Fvs and antibodies include those described in U.S. Pat. Nos. 4,946,778 and 5,258,498; Huston et al., Methods in Enzymology, 203:46-88 (1991); Shu et al., Proc. Natl. Acad. Sci. USA, 90:7995-7999 (1993); and Skerra et al., Science, 240:1038-1040 (1988). For some uses, including the in vivo use of antibodies in humans and in in vitro detection assays, it may be preferable to use chimeric, humanized, or human antibodies. A chimeric antibody is a molecule in which different portions of the antibody are derived from different animal species, such as antibodies having a variable region derived from a murine monoclonal immunoglobulin and a human immunoglobulin constant region. Methods for producing chimeric antibodies are known in the art. (See, e.g., Morrison, Science, 229:1202 (1985); Oi et al., BioTechniques, 4:214 (1986); Gillies et al., J. Immunol. Methods, 125:191-202 (1989); and U.S. Pat. Nos. 5,807,715; 4,816,567; and 4,816,397, which are incorporated herein by reference in their entirety).

[0244] Humanized antibodies are antibody molecules from non-human species that bind to the desired antigen and have one or more complementarity determining regions (CDRs) from the nonhuman species and framework regions from a human immunoglobulin molecule. Often, framework residues in the human framework regions are substituted with corresponding residues from the CDR and framework regions of the donor antibody to alter, preferably improve, antigen binding. These framework substitutions are identified by methods well known in the art, e.g., by modeling of the interactions of the CDR and framework residues to identify framework residues important for antigen binding, and by sequence comparison to identify unusual framework residues at particular positions. (See, e.g., Queen et al., U.S. Pat. Nos. 5,693,762 and 5,585,089; and Riechmann et al., Nature, 332:323 (1988), which are incorporated herein by reference in their entireties). Antibodies can be humanized using a variety of techniques known in the art, including, for example, CDR-grafting (EP 239,400; PCT publication WO 91/09967; U.S. Pat. Nos. 5,225,539; 5,530,101; and 5,585,089); veneering or resurfacing (EP 592,106; EP 519,596; Padlan, Molecular Immunology, 28(4/5):489-498 (1991); Studnicka et al., Protein Engineering, 7(6):805-814 (1994); Roguska et al., Proc. Natl. Acad. Sci. USA, 91:969-973 (1994); and chain shuffling (U.S. Pat. No. 5,565,332).

[0245] Completely human antibodies can be made by a variety of methods known in the art, including the phage display methods described above, using antibody libraries derived from human immunoglobulin sequences. See also, U.S. Pat. Nos. 4,444,887 and 4,716,111; and PCT publications WO 98/46645, WO 98/50433, WO 98/24893, WO 98/16654, WO 96/34096, WO 96/33735, and WO 91/10741; each of which is incorporated herein by reference in its entirety.

[0246] Completely human antibodies are particularly desirable for therapeutic treatment of human patients, so as to avoid or alleviate immune reaction to foreign protein. Human antibodies can be made by a variety of methods known in the art, including the phage display methods described above, using antibody libraries derived from human immunoglobulin sequences. See also, U.S. Pat. Nos. 4,444,887 and 4,716,111; and PCT publications WO 98/46645, WO 98/50433, WO 98/24893, WO 98/16654, WO 96/34096, WO 96/33735, and WO 91/10741; each of which is incorporated herein by reference in its entirety.

[0247] Human antibodies can also be produced using transgenic mice which are incapable of expressing functional endogenous immunoglobulins, but which can express human immunoglobulin polynucleotides. For example, the human heavy and light chain immunoglobulin polynucleotide complexes can be introduced randomly, or by homologous recombination, into mouse embryonic stem cells. Alternatively, the human variable region, constant region, and diversity region may be introduced into mouse embryonic stem cells, in addition to the human heavy and light chain polynucleotides. The mouse heavy and light chain immunoglobulin polynucleotides can be rendered nonfunctional separately or simultaneously with the introduction of human immunoglobulin loci by homologous recombination. In particular, homozygous deletion of the J_{H} region prevents endogenous antibody production. The modified embryonic stem cells are expanded and microinjected into blastocysts to produce chimeric mice. The chimeric mice are then bred to produce homozygous offspring which express human antibodies. The transgenic mice are immunized in the normal fashion with a selected antigen, e.g., all or a portion of a polypeptide of the invention.

[0248] Thus, using such a technique, it is possible to produce useful human IgG, IgA, IgM, IgD and IgE antibodies. For an overview of the technology for producing human antibodies, see Lonberg and Huszar, Intl. Rev. Immunol., 13:65-93 (1995). For a detailed discussion of the technology for producing human antibodies and human monoclonal antibodies and protocols for producing such antibodies, see, e.g., PCT publications WO 98/24893; WO 92/01047; WO 96/34096; WO 96/33735; European Patent No. 0 598 877; U.S. Pat. Nos. 5,413,923; 5,625,126; 5,633,425; 5,569,825; 5,661,016; 5,545,806; 5,814,318; 5,885,793; 5,916,771; 5,939,598; 6,075,181; and 6,114,598, which are incorporated by reference herein in their entirety. In addition, companies such as Abgenix, Inc. (Fremont, Calif.), Protein Design Labs, Inc. (Mountain View, Calif.) and Genpharm (San Jose, Calif.) can be engaged to provide human antibodies directed against a selected antigen using technology similar to the above described technologies.

[0249] Completely human antibodies which recognize a selected epitope can be generated using a technique referred to as “guided selection”. In this approach, a selected non-human monoclonal antibody, e.g., a mouse antibody, is used to guide the selection of a completely human antibody recognizing the same epitope. (Jespers et al., BioTechnology, 12:899-903 (1988)).

[0250] Further, antibodies to the protein tyrosine kinase polypeptides of the invention can, in turn, be utilized to generate anti-idiotypic antibodies that “mimic” protein tyrosine kinase biomarker polypeptides of the invention using techniques well known to those skilled in the art. (See, e.g., Greenspan and Bona, FASEB J., 7(5):437-444 (1989) and Nissinoff, J. Immunol., 147(8):2429-2438 (1991)). For example, antibodies which bind to and competitively inhibit polypeptide multimerization and/or binding of a polypeptide of the invention to a ligand can be used to generate anti-idiotypes that “mimic” the polypeptide multimerization and/or binding domain and, as a consequence, bind to and neutralize the polypeptide and/or its ligand, e.g., in therapeutic regimens. Such neutralizing anti-idiotypes or Fab fragments of such anti-idiotypes can be used to neutralize polypeptide ligand. For example, such anti-idiotypic antibodies can be used to bind a polypeptide of the invention and/or to bind its ligands/receptors, and thereby activate or block its biological activity.

[0251] Intrabodies are antibodies, often scFvs, that are expressed from a recombinant nucleic acid molecule and are engineered to be retained intracellularly (e.g., retained in the cytoplasm, endoplasmic reticulum, or periplasm of the host cells). Intrabodies can be used, for example, to ablate the function of a protein to which the intrabody binds. The expression of intrabodies can also be regulated through the use of inducible promoters in the nucleic acid expression vector comprising nucleic acid encoding the intrabody. Intrabodies of the invention can be produced using methods known in the art, such as those disclosed and reviewed in Chen et al., Hum. Polynucleotide Ther., 5:595-601 (1994); Marasco, W. A., Polynucleotide Ther., 4:11-15 (1997); Rondon and Marasco, Annu. Rev. Microbiol., 51:257-283 (1997); Proba et al., J. Mol. Biol., 275:245-253 (1998); Cohen et al., Oncogene, 17:2445-2456 (1998); Ohage and Steipe, J. Mol. Biol., 291:1119-1128 (1999); Ohage et al., J. Mol. Biol., 291:1129-1134 (1999); Wirtz and Steipe, Protein Sci., 8:2245-2250 (1999); and Zhu et al., J. Immunol. Methods, 231:207-222 (1999).

[0252] XENOMOUSE® Technology Antibodies in accordance with the invention are preferably prepared by the utilization of a transgenic mouse that has a substantial portion of the human antibody producing genome inserted into its genome, but that is rendered deficient in the production of endogenous murine antibodies (e.g., XENOMOUSE® strains available from Abgenix Inc., Fremont, Calif.). Such mice are capable of producing human immunoglobulin molecules and are virtually deficient in the production of murine immunoglobulin molecules. Technologies utilized for achieving the same are disclosed in the patents, applications, and references disclosed herein.

[0253] The ability to clone and reconstruct megabase-sized human loci in YACs and to introduce them into the mouse germline provides a powerful approach to elucidating the functional components of very large or crudely mapped loci, as well as generating useful models of human disease. Furthermore, the utilization of such technology for substitution of mouse loci with their human equivalents could provide unique insights into the expression and regulation of human polynucleotide products during development, their communication with other systems, and their involvement in disease induction and progression. An important practical application of such a strategy is the “humanization” of the mouse humoral immune system. Introduction of human immunoglobulin (Ig) loci into mice in which the endogenous Ig polynucleotides have been inactivated offers the opportunity to study the mechanisms underlying programmed expression and assembly of antibodies as well as their role in B cell development. Furthermore, such a strategy could provide an ideal source for the production of fully human monoclonal antibodies (Mabs), which is an important milestone toward fulfilling the promise of antibody therapy in human disease.

[0254] Fully human antibodies are expected to minimize the immunogenic and allergic responses intrinsic to mouse or mouse-derivatized monoclonal antibodies and thus to increase the efficacy and safety of the administered antibodies. The use of fully human antibodies can be expected to provide a substantial advantage in the treatment of chronic and recurring human diseases, such as cancer, which require repeated antibody administrations.

[0255] One approach toward this goal was to engineer mouse strains deficient in mouse antibody production to harbor large fragments of the human Ig loci in anticipation that such mice would produce a large repertoire of human antibodies in the absence of mouse antibodies. Large human Ig fragments would preserve the large variable polynucleotide diversity as well as the proper regulation of antibody production and expression. By exploiting the mouse machinery for antibody diversification and selection and the lack of immunological tolerance to human proteins, the reproduced human antibody repertoire in these mouse strains should yield high affinity antibodies against any antigen of interest, including human antigens. Using the hybridoma technology, antigen-specific human monoclonal antibodies with the desired specificity could be readily produced and selected.

[0256] This general strategy was demonstrated in connection with the generation of the first “XENOMOUSE® T” strains as published in 1994. See Green et al., Nature Genetics, 7:13-21 (1994). The XENOMOUSE® strains were engineered with yeast artificial chromosomes (YACS) containing 245 kb and 10, 190 kb-sized germline configuration fragments of the human heavy chain locus and kappa light chain locus, respectively, which contained core variable and constant region sequences. Id. The human Ig-containing YACs proved to be compatible with the mouse system for both rearrangement and expression of antibodies and were capable of substituting for the inactivated mouse Ig polynucleotides. This was demonstrated by their ability to induce B-cell development, to produce an adult-like human repertoire of fully human antibodies, and to generate antigen-specific human monoclonal antibodies. These results also suggested that introduction of larger portions of the human Ig loci containing greater numbers of V polynucleotides, additional regulatory elements, and human Ig constant regions might recapitulate substantially the full repertoire that is characteristic of the human humoral response to infection and immunization. The work of Green et al. was recently extended to the introduction of greater than approximately 80% of the human antibody repertoire through the use of megabase-sized, germline configuration YAC fragments of the human heavy chain loci and kappa light chain loci, respectively, to produce XENOMOUSE® mice. See Mendez et al., Nature Genetics, 15:146-156 (1997); Green and Jakobovits, J. Exp. Med., 188:483-495 (1998); and Green, Journal of Immunological Methods, 231:11-23 (1999), the disclosures of which are hereby incorporated herein by reference.

[0257] Human anti-mouse antibody (HAMA) responses have led the industry to prepare chimeric or otherwise humanized antibodies. While chimeric antibodies typically are comprised of a human constant region and a murine variable region, it is expected that certain human anti-chimeric antibody (HACA) responses will be observed, particularly in treatments involving chronic or multi-dose utilizations of the antibody. Thus, it is desirable to provide fully human antibodies against protein tyrosine kinase biomarker polypeptides in order to vitiate concerns and/or effects of HAMA or HACA responses.

[0258] Antibodies of the invention can be chemically synthesized or produced through the use of recombinant expression systems. Accordingly, the invention further embraces polynucleotides comprising a nucleotide sequence encoding an antibody of the invention and fragments thereof. The invention also encompasses polynucleotides that hybridize under stringent or lower stringency hybridization conditions, e.g., as defined supra, to polynucleotides that encode an antibody, preferably, an antibody that specifically binds to a protein tyrosine kinase polypeptide of this invention, and more preferably, an antibody that binds to a polypeptide having the amino acid sequence of one or more of the protein tyrosine kinase biomarker sequences, e.g., Src tyrosine kinase biomarkers, as set forth in Table 2.

[0259] The polynucleotides may be obtained, and the nucleotide sequence of the polynucleotides determined, by any method known in the art. For example, if the nucleotide sequence of the antibody is known, a polynucleotide encoding the antibody can be assembled from chemically synthesized oligonucleotides (e.g., as described in Kutmeier et al., BioTechniques, 17:242 (1994)), which, briefly, involves the synthesis of overlapping oligonucleotides containing portions of the sequence encoding the antibody, the annealing and ligating of those oligonucleotides, and then the amplification of the ligated oligonucleotides by PCR.

[0260] Alternatively, a polynucleotide encoding an antibody can be generated from nucleic acid from a suitable source. If a clone containing a nucleic acid encoding a particular antibody is not available, but the sequence of the antibody molecule is known, a nucleic acid encoding the immunoglobulin can be chemically synthesized or obtained from a suitable source (e.g., an antibody cDNA library, or a cDNA library generated from, (or a nucleic acid, preferably poly A+ RNA, isolated from), any tissue or cells expressing the antibody, such as hybridoma cells selected to express an antibody of the invention by PCR amplification using synthetic primers hybridizable to the 3′ and 5′ ends of the sequence. Alternatively, cloning using an oligonucleotide probe specific for the particular polynucleotide sequence to be identified, e.g., a cDNA clone from a cDNA library that encodes the desired antibody can be employed. Amplified nucleic acids generated by PCR can then be cloned into replicable cloning vectors using any method well known in the art.

[0261] Once the nucleotide sequence and corresponding encoded amino acid sequence of the antibody are determined, the nucleotide sequence of the antibody can be manipulated using methods well known in the art for the manipulation of nucleotide sequences, e.g., recombinant DNA techniques, site directed mutapolynucleotidesis, PCR, etc. (see, for example, the techniques described in Sambrook et al., Molecular Cloning, A Laboratory Manual, 2nd Ed., Cold Spring Harbor Laboratory, Cold Spring Harbor, N.Y. (1990); and F. M. Ausubel et al., eds., Current Protocols in Molecular Biology, John Wiley & Sons, NY (1998), which are both incorporated by reference herein in their entireties), to generate antibodies having a different amino acid sequence, for example, to create amino acid substitutions, deletions, and/or insertions.

[0262] In a specific embodiment, the amino acid sequence of the heavy and/or light chain variable domains can be inspected to identify the sequences of the CDRs by methods that are well known in the art, e.g., by comparison to known amino acid sequences of other heavy and light chain variable regions, to determine the regions of sequence hypervariability. Using routine recombinant DNA techniques, one or more of the CDRs can be inserted within framework regions, e.g., into human framework regions, to humanize a non-human antibody, as described supra. The framework regions can be naturally occurring or consensus framework regions, and preferably, are human framework regions (see, e.g., Chothia et al., J. Mol. Biol., 278:457-479 (1998), for a listing of human framework regions).

[0263] Preferably, the polynucleotide generated by the combination of the framework regions and CDRs encodes an antibody that specifically binds to a protein tyrosine kinase biomarker polypeptide of the invention. Also preferably, as discussed supra, one or more amino acid substitutions can be made within the framework regions; such amino acid substitutions are performed with the goal of improving binding of the antibody to its antigen, e.g., greater antibody binding affinity. In addition, such methods can be used to make amino acid substitutions or deletions of one or more variable region cysteine residues participating in an intrachain disulfide bond to generate antibody molecules lacking one or more intrachain disulfide bonds. Other alterations that can be made to the polynucleotide are encompassed by the present invention and are within the skill of the art.

[0264] For some uses, such as for in vitro affinity maturation of an antibody of the invention, it is useful to express the V_{H} and V_{L} domains of the heavy and light chains of one or more antibodies of the invention as single chain antibodies, or Fab fragments, in a phage display library using phage display methods as described supra. For example, the cDNAs encoding the V_{H} and V_{L} domains of one or more antibodies of the invention can be expressed in all possible combinations using a phage display library, thereby allowing for the selection of V_{H}/V_{L} combinations that bind to the protein tyrosine kinase biomarker polypeptides according to the present invention with preferred binding characteristics such as improved affinity or improved off rates. In addition, V_{H} and V_{L} segments, particularly, the CDR regions of the V_{H} and V_{L} domains of one or more antibodies of the invention, can be mutated in vitro. Expression of V_{H} and V_{L} domains with “mutant” CDRs in a phage display library allows for the selection of V_{H}/V_{L} combinations that bind to protein tyrosine kinase biomarkers, e.g., Src tyrosine kinase biomarker proteins, which are receptor polypeptides with preferred binding characteristics such as improved affinity or improved off rates.

[0265] Once an antibody molecule of the invention has been produced by an animal, chemically synthesized, or recombinantly expressed, it can be purified by any method known in the art for the purification of an immunoglobulin or polypeptide molecule, for example, by chromatography (e.g., ion exchange, affinity, particularly by affinity for the specific antigen, Protein A, and sizing column chromatography), centrifugation, differential solubility, or by any other standard technique for the purification of proteins. In addition, the antibodies of the present invention or fragments thereof can be fused to heterologous polypeptide sequences described herein or otherwise known in the art, to facilitate purification.

[0266] The present invention encompasses antibodies that are recombinantly fused or chemically conjugated (including both covalently and non-covalently conjugated) to a polypeptide (or portion thereof, preferably at least 10, 20, 30, 40, 50, 60, 70, 80, 90 or 100 amino acids of the polypeptide) of the present invention to generate fusion proteins. The fusion does not necessarily need to be direct, but can occur through linker sequences. The antibodies can be specific for antigens other than polypeptides (or portions thereof, preferably at least 10, 20, 30, 40, 50, 60, 70, 80, 90 or 100 amino acids of the polypeptide) of the present invention. For example, antibodies can be used to target the polypeptides of the present invention to particular cell types, either in vitro or in vivo, by fusing or conjugating the polypeptides of the present invention to antibodies specific for particular cell surface receptors.

[0267] The present invention further includes compositions comprising the protein tyrosine kinase biomarker polypeptides of the present invention fused or conjugated to antibody domains other than the variable region domain. For example, the polypeptides of the present invention can be fused or conjugated to an antibody Fc region, or portion thereof. The antibody portion fused to a polypeptide of the present invention can comprise the constant region, hinge region, CH1 domain, CH2 domain, CH3 domain, or any combination of whole domains or portions thereof. The polypeptides can also be fused or conjugated to the above antibody portions to form multimers. For example, Fc portions of immunoglobulin molecules fused to the polypeptides of the present invention can form dimers through disulfide bonding between the Fc portions. Higher multimeric forms can be made by fusing the polypeptides to portions of IgA and IgM. Methods for fusing or conjugating the polypeptides of the present invention to antibody portions are known in the art. (See, e.g., U.S. Pat. Nos. 5,336,603; 5,622,929; 5,359,046; 5,349,053; 5,447,851; 5,112,946; EP 307,434; EP 367,166; PCT publications WO 96/04388; WO 91/06570; Ashkenazi et al., Proc. Natl. Acad. Sci. USA, 88:10535-10539 (1991); Zheng et al., J. Immunol., 154:5590-5600 (1995); and Vil et al., Proc. Natl. Acad. Sci. USA, 89:11337-11341, which are hereby incorporated by reference herein in their entireties).

[0268] As discussed supra, the polypeptides corresponding to a polypeptide, polypeptide fragment, or a variant of one or more of the protein tyrosine kinase biomarker amino acid sequences as set forth in Table 2 can be fused or conjugated to the above antibody portions to increase the in vivo half life of the polypeptides, or for use in immunoassays using methods known in the art. Further, the polypeptides corresponding to one or more of the protein tyrosine kinase biomarker, e.g., src biomarker, sequences as set forth in Table 2 can be fused or conjugated to the above antibody portions to facilitate purification. For guidance, chimeric proteins having the first two domains of the human CD4 polypeptide and various domains of the constant regions of the heavy or light chains of mammalian immunoglobulins have been described. (EP 394,827; Traunecker et al., Nature, 331:84-86 (1988)). The polypeptides of the present invention fused or conjugated to an antibody, or portion thereof, having disulfide-linked dimeric structures (due to the IgG), for example, can also be more efficient in binding and neutralizing other molecules than the monomeric secreted protein or protein fragment alone. (Fountoulakis et al., J. Biochem., 270:3958-3964 (1995)). In many cases, the Fc portion in a fusion protein is beneficial in therapy, diagnosis, and/or screening methods, and thus can result in, for example, improved pharmacokinetic properties. (EP 232,262 A). In drug discovery, for example, human proteins, such as huIL-5, have been fused with Fc portions for the purpose of high-throughput screening assays to identify antagonists of huIL-5. (See, Bennett et al., J. Molecular Recognition, 8:52-58 (1995); and Johanson et al., J. Biol. Chem., 270:9459-9471 (1995)). Alternatively, deleting the Fc portion after the fusion protein has been expressed, detected, and purified may be desired. For example, the Fc portion may hinder therapy and diagnosis if the fusion protein is used as an antigen for immunizations.

[0269] Moreover, the antibodies or fragments thereof of the present invention can be fused to marker sequences, such as a peptide, to facilitate their purification. In preferred embodiments, the marker amino acid sequence is a hexa-histidine peptide, such as the tag provided in a pQE vector (QIAGEN, Inc., Chatsworth, Calif.), among others, many of which are commercially available. As described in Gentz et al., Proc. Natl. Acad. Sci. USA, 86:821-824 (1989), for instance, hexa-histidine provides for convenient purification of the fusion protein. Other peptide tags useful for purification include, but are not limited to, the “HA” tag, which corresponds to an epitope derived from the influenza hemagglutinin (HA) protein (Wilson et al., Cell, 37:767 (1984)) and the “flag” tag.

[0270] The present invention further encompasses antibodies or fragments thereof conjugated to a diagnostic or therapeutic agent. The antibodies can be used diagnostically to, for example, monitor the development or progression of a tumor as part of a clinical testing procedure, for example, to determine the efficacy of a given treatment regimen. Detection can be facilitated by coupling the antibody to a detectable substance. Nonlimiting examples of detectable substances include various enzymes, prosthetic groups, fluorescent materials, luminescent materials, bioluminescent materials, radioactive materials, positron emitting metals using various positron emission tomographies, and nonradioactive paramagnetic metal ions. The detectable substance can be coupled or conjugated either directly to the antibody (or fragment thereof) or indirectly, through an intermediate (such as, for example, a linker known in the art) using techniques known in the art. (See, for example, U.S. Pat. No. 4,741,900 for metal ions which can be conjugated to antibodies for use as diagnostics according to the present invention).

[0271] Nonlimiting examples of suitable enzymes include horseradish peroxidase, alkaline phosphatase, beta-galactosidase, or acetylcholinesterase. Nonlimiting examples of suitable prosthetic group complexes include streptavidin/biotin and avidin/biotin; nonlimiting examples of suitable fluorescent materials include umbelliferone, fluorescein, fluorescein isothiocyanate, rhodamine, dichlorotriazinylamine fluorescein, dansyl chloride or phycoerythrin; a nonlimiting example of a luminescent material includes luminol; nonlimiting examples of bioluminescent materials include luciferase, luciferin, and aequorin; and nonlimiting examples of suitable radioactive material include iodine (¹²⁵I, ¹³¹I) carbon (¹⁴C), sulfur (3sus), tritium (³H), indium (¹¹¹In and other radioactive isotopes of indium), technetium (⁹⁹Tc, ^{99m}Tc), thallium (20′Ti), gallium (⁶⁸Ga, ⁶⁷Ga), palladium (¹⁰³Pd), molybdenum (⁹⁹Mo), xenon (¹³³Xe), fluorine (¹⁹F), ¹⁵³Sm, ¹⁷⁷ Lu, Gd, radioactive Pm, radioactive La, radioactive Yb, ¹⁶⁶Ho, ⁹⁰Y, radioactive Sc, radioactive Re, radioactive Re, ¹⁴²Pr, ¹⁰⁵Rh, and ⁹⁷Ru.

[0272] In specific embodiments, the protein tyrosine kinase biomarker polypeptides of the invention are attached to macrocyclic chelators useful for conjugating radiometal ions, including, but not limited to, ¹¹¹In, ¹⁷⁷Lu, ⁹⁰Y, ¹⁶⁶Ho, and ¹⁵³Sm, to polypeptides. In a preferred embodiment, the radiometal ion associated with the macrocyclic chelators attached to the protein tyrosine kinase biomarker polypeptides of the invention is ¹¹¹In. In another preferred embodiment, the radiometal ion associated with the macrocyclic chelator attached to the protein tyrosine kinase biomarker polypeptides of the invention is ⁹⁰Y. In specific embodiments, the macrocyclic chelator is 1, 4, 7, 10-tetraazacyclododecane-N,N′, N″, N′″-tetraacetic acid (DOTA). In other specific embodiments, the DOTA is attached to the protein tyrosine kinase biomarker polypeptides of the invention via a linker molecule.

[0273] Examples of linker molecules useful for conjugating DOTA to a polypeptide are commonly known in the art. (See, for example, DeNardo et al., Clin. Cancer Res., 4(10):2483-2490 (1998); Peterson et al., Bioconjug. Chem., 10(4):553-557 (1999); and Zimmerman et al., Nucl. Med. Biol., 26(8):943-950 (1999), which are hereby incorporated by reference in their entirety). In addition, U.S. Pat. Nos. 5,652,361 and 5,756,065, which disclose chelating agents that can be conjugated to antibodies and methods for making and using them, are hereby incorporated by reference in their entireties. Though U.S. Pat. Nos. 5,652,361 and 5,756,065 focus on conjugating chelating agents to antibodies, one skilled in the art can readily adapt the methods disclosed therein in order to conjugate chelating agents to other polypeptides.

[0274] Antibodies can also be attached to solid supports, which are particularly useful for immunoassays or purification of the target antigen. Such solid supports include, but are not limited to, glass, cellulose, polyacrylamide, nylon, polystyrene, polyvinyl chloride or polypropylene. Techniques for conjugating therapeutic moieties to antibodies are well known, see, e.g., Amon et al., “Monoclonal Antibodies For Immunotargeting of Drugs in Cancer Therapy”, Monoclonal Antibodies And Cancer Therapy, Reisfeld et al., eds., Alan R. Liss, Inc., pp. 243-256 (1985); Hellstrom et al., “Antibodies For Drug Delivery”, Controlled Drug Delivery, 2nd Ed., Robinson et al., eds., Marcel Dekker, Inc., pp. 623-653 (1987); Thorpe, “Antibody Carriers of Cytotoxic Agents in Cancer Therapy: A Review”, Monoclonal Antibodies '84: Biological And Clinical Applications, Pinchera et al., eds., pp. 475-506 (1985); “Analysis, Results, and Future Prospective of the Therapeutic Use of Radiolabeled Antibody In Cancer Therapy”, Monoclonal Antibodies for Cancer Detection and Therapy, Baldwin et al., eds., Academic Press, pp. 303-316 (1985); and Thorpe et al., “The Preparation and Cytotoxic Properties of Antibody-Toxin Conjugates”, Immunol. Rev., 62:119-158 (1982). Alternatively, an antibody can be conjugated to a second antibody to form an antibody heteroconjugate, e.g., as described in U.S. Pat. No. 4,676,980 to Segal, which is incorporated herein by reference in its entirety. An antibody, i.e., an antibody specific for a protein tyrosine kinase biomarker polypeptide of this invention, with or without a therapeutic moiety conjugated to it, and administered alone or in combination with cytotoxic factor(s) and/or cytokine(s), can be used as a therapeutic.

[0275] The antibodies of the invention can further be utilized for immunophenotyping of cell lines and biological samples. The translation product of the protein tyrosine kinase biomarker-encoding polynucleotides of the present invention can be useful as cell specific marker(s), or more specifically, as cellular marker(s) that are differentially expressed at various stages of differentiation and/or maturation of particular cell types. Monoclonal antibodies directed against a specific epitope, or combination of epitopes, allow for the screening of cellular populations expressing the marker. Various techniques utilizing monoclonal antibodies can be employed to screen for cellular populations expressing the marker(s), including magnetic separation using antibody-coated magnetic beads, “panning” with antibody(ies) attached to a solid matrix (i.e., tissue culture plate), and flow cytometry (See, e.g., U.S. Pat. No. 5,985,660; Morrison et al., Cell, 96:737-749 (1999); and L. J. Wysocki and V. L. Sato, Proc. Natl. Acad. Sci. USA, 75(6):2844-2848 (1978)).

[0276] These techniques allow for the screening of particular populations of cells, such as might be found with hematological malignancies (i.e., minimal residual disease (MRD) in acute leukemic patients) and “non-self” cells in transplantations to prevent Graft-versus-Host Disease (GVHD). Alternatively, these techniques allow for the screening of hematopoietic stem and progenitor cells capable of undergoing proliferation and/or differentiation, as might be found in human umbilical cord blood.

[0277] Antibodies according to this invention can be assayed for immunospecific binding by any method known in the art. The immunoassays which can be used include, but are not limited to, competitive and non-competitive assay systems using techniques such as BIAcore analysis, FACS (Fluorescence Activated Cell Sorter) analysis, immunofluorescence, immunocytochemistry, Western blots, radioimmunoassays, ELISA (enzyme linked immunosorbent assays), “sandwich” immunoassays, immunoprecipitation assays, precipitin reactions, gel diffusion precipitin reactions, immunodiffusion assays, agglutination assays, complement fixation assays, immunoradiometric assays, fluorescent immunoassays, protein A immunoassays, to name but a few. Such assays are routine and well known and practiced in the art (see, e.g., Ausubel et al., eds., Current Protocols in Molecular Biology, Vol. 1, John Wiley & Sons, Inc., New York (1994), which is incorporated by reference herein in its entirety). Nonlimiting, exemplary immunoassays are described briefly below.

[0278] Immunoprecipitation protocols generally comprise lysing a population of cells in a lysis buffer such as RIPA buffer (i.e., 1% NP-40 or Triton X-100, 1% sodium deoxycholate, 0.1% SDS, 0.15 M NaCl, 0.01 M sodium phosphate at pH 7.2, 1% TRASYLOL®) supplemented with protein phosphatase and/or protease inhibitors (e.g., EDTA, PMSF, aprotinin, sodium vanadate); adding the antibody of interest to the cell lysate; incubating for a period of time (e.g., 1 to 4 hours) at 4° C.; adding protein A and/or protein G sepharose beads to the cell lysate; incubating for about 60 minutes or more at 4° C.; washing the beads in lysis buffer; and resuspending the beads in SDS/sample buffer. The ability of the antibody of interest to immunoprecipitate a particular antigen can be assessed by, for example, Western blot analysis. One of skill in the art would be knowledgeable as to the parameters that can be modified to increase the binding of the antibody to an antigen and decrease the background (e.g., pre-clearing the cell lysate with sepharose beads). For further discussion regarding immunoprecipitation protocols, see, e.g., Ausubel et al., eds., Current Protocols in Molecular Biology, Vol. 1, John Wiley & Sons, Inc., New York, at 10.16.1 (1994).

[0279] Western blot analysis generally comprises preparing protein samples; electrophoresis of the protein samples in a polyacrylamide gel (e.g., 8%-20% SDS PAGE depending on the molecular weight of the antigen); transferring the protein sample from the polyacrylamide gel to a membrane such as nitrocellulose, PVDF or nylon; blocking the membrane in blocking solution (e.g., PBS with 3% BSA or nonfat milk); washing the membrane in washing buffer (e.g., PBS-Tween 20); blocking the membrane with primary antibody (the antibody of interest) diluted in blocking buffer; washing the membrane in washing buffer; blocking the membrane with a secondary antibody (which recognizes the primary antibody, e.g., an anti-human antibody) conjugated to an enzymatic substrate (e.g., horseradish peroxidase or alkaline phosphatase) or radioactive molecule (e.g., ³²P or ¹²⁵I) diluted in blocking buffer; washing the membrane in wash buffer; and detecting the presence of the bound antigen. One of skill in the art would be knowledgeable as to the parameters that can be modified to increase the signal detected and to reduce the background noise. For further discussion regarding Western blot protocols, see, e.g., Ausubel et al., eds., Current Protocols in Molecular Biology, Vol. 1, John Wiley & Sons, Inc., New York, at 10.8.1 (1994).

[0280] ELISAs comprise preparing antigen; coating the wells of a 96-well microtiter plate with antigen; adding to the wells the antibody of interest conjugated to a detectable compound such as an enzymatic substrate (e.g., horseradish peroxidase or alkaline phosphatase); incubating for a period of time; and detecting the presence of the antigen. In ELISAs, the antibody of interest does not have to be conjugated to a detectable compound; instead, a second antibody (which recognizes the antibody of interest bound to antigen) conjugated to a detectable compound can be added to the wells. Further, instead of coating the wells with antigen, the antibodies can be first coated onto the well. In this case, a second antibody conjugated to a detectable compound can be added to the antibody-coated wells following the addition of the antigen of interest. One of skill in the art would be knowledgeable as to the parameters that can be modified to increase the signal detected, as well as other variations of ELISAs known in the art. For further discussion regarding ELISAs, see, e.g., Ausubel et al., eds., Current Protocols in Molecular Biology, Vol. 1, John Wiley & Sons, Inc., New York, at 11.2.1 (1994).

[0281] The binding affinity of an antibody to an antigen and the off-rate of an antibody-antigen interaction can be determined by competitive binding assays. One example of a competitive binding assay is a radioimmunoassay involving the incubation of labeled antigen (e.g., ³H or ¹²⁵I), or a fragment or variant thereof, with the antibody of interest in the presence of increasing amounts of labeled antigen, and the detection of the antibody bound to the labeled antigen. The affinity of the antibody of interest for a protein tyrosine kinase biomarker and the binding off rates can be determined from the data by Scatchard plot analysis. Competition with a second antibody can also be determined using radioimmunoassays. In this case, the tyrosine kinase biomarker protein is incubated with an antibody of interest conjugated to a labeled compound (e.g., a compound labeled with ³H or ¹²⁵I) in the presence of increasing amounts of an unlabeled second antibody. This kind of competitive assay between two antibodies can also be used to determine if two antibodies bind to the same or different epitopes on an antigen.

[0282] In a preferred embodiment, BIAcore kinetic analysis is used to determine the binding on and off rates of antibodies (including antibody fragments or variants thereof) to a tyrosine kinase biomarker protein, or fragments of a tyrosine kinase biomarker protein. Kinetic analysis comprises analyzing the binding and dissociation of antibodies from chips with immobilized tyrosine kinase biomarker protein on the chip surface.

[0283] It is to be further understood that the above-described techniques for the production, expression, isolation, and manipulation of antibody molecules, for example, by recombinant techniques involving molecular biology, as well as by other techniques related to the analysis of polynucleotides and proteins, are applicable to other polypeptide or peptide molecules of the invention as described herein, in particular, the tyrosine kinase biomarker polypeptides or peptides themselves, as applicable or warranted. in accordance with the various embodiments of this invention.

[0284] The present invention also embraces a kit for determining, predicting, or prognosing drug susceptibility or resistance by a patient having a disease, particularly a cancer or tumor, preferably, a prostate cancer or tumor. Such kits are useful in a clinical setting for use in testing patient's biopsied tumor or cancer samples, for example, to determine or predict if the patient's tumor or cancer will be resistant or sensitive to a given treatment or therapy with a drug, compound, chemotherapy agent, or biological treatment agent. Provided in the kit are the predictor set comprising those polynucleotides correlating with resistance and sensitivity to protein tyrosine kinase modulators in a particular biological system, particularly protein tyrosine kinase inhibitors, and preferably comprising a microarray; and, in suitable containers, the modulator compounds for use in testing cells from patient tissue or patient samples for resistance/sensitivity; and instructions for use. Such kits encompass predictor set comprising those polynucleotides correlating with resistance and sensitivity to modulators of protein tyrosine kinases including members of the Src family of tyrosine kinases, for example, Src, Fgr, Fyn, Yes, Blk, Hck, Lck and Lyn, as well as other protein tyrosine kinases, including, Bcr-abl, Jak, PDGFR, c-kit and Eph receptors,

[0285] Also, as explained above, the kit is not limited to microarrays, but can encompass a variety of methods and systems by which the expression of the predictor/marker polynucleotides can be assayed and/or monitored, both at the level of mRNA and of protein, for example, via PCR assays, e.g., RT-PCR and immunoassay, such as ELISA. In kits for performing PCR, or in situ hybridization, for example, nucleic acid primers or probes from the sequences of one or more of the predictor polynucleotides, such as those described herein, in addition to buffers and reagents as necessary for performing the method, and instructions for use. In kits for performing immunoassays, e.g., ELISAs, immunoblotting assays, and the like, antibodies, or bindable portions thereof, to the protein tyrosine kinase biomarker polypeptides of the invention, or to antigenic or immunogenic peptides thereof, are supplied, in addition to buffers and reagents as necessary for performing the method, and instructions for use. The kits according to the present invention can also comprise predictor polynucleotides as set forth in Table 2, and/or one or more of the specific predictor polynucleotide subsets as presented in Tables 3, 4, or 5 herein.

[0286] In another embodiment, the present invention embraces the use of one or more polynucleotides among those of the predictor polynucleotides identified herein that can serve as targets for the development of drug therapies for disease treatment. Such targets may be particularly applicable to treatment of prostate diseases, such as prostate cancers or tumors. Indeed, because these predictor polynucleotides are differently expressed in sensitive and resistant cells, their expression pattern is correlated with relative intrinsic sensitivity of cells to treatment with compounds that interact with and inhibit protein tyrosine kinases. Accordingly, the polynucleotides highly expressed in resistant cells can serve as targets for the development of drug therapies for the tumors which are resistant to protein tyrosine kinase inhibitor compounds, for example, Src tyrosine kinase inhibitors.

[0287] In another embodiment, the present invention embraces antisense and/or siRNAi reagents as specific modulators of the predictor polynucleotides of the present invention. In specific embodiments, antagonists according to the present invention are nucleic acids corresponding to the sequences contained in one or more of the sequences provided as SEQ ID NO:1 thru 176, or the complementary strand thereof. In one embodiment, antisense sequence is generated internally by the organism, in another embodiment, the antisense sequence is separately administered (see, for example, O'Connor, Neurochem., 56:560 (1991); Oligodeoxynucleotides as Antisense Inhibitors of Gene Expression, CRC Press, Boca Raton, Fla. (1988). Antisense technology can be used to control gene expression through antisense DNA or RNA, or through triple-helix formation. Antisense techniques are discussed for example, in Okano, Neurochem., 56:560 (1991); Oligodeoxynucleotides as Antisense Inhibitors of Gene Expression, CRC Press, Boca Raton, Fla. (1988). Triple helix formation is discussed in, for instance, Lee et al., Nucleic Acids Research, 6:3073 (1979); Cooney et al., Science, 241:456 (1988); and Dervan et al., Science, 251:1300 (1991). The methods are based on binding of a polynucleotide to a complementary DNA or RNA.

[0288] For example, the use of c-myc and c-myb antisense RNA constructs to inhibit the growth of the non-lymphocytic leukemia cell line HL-60 and other cell lines was previously described. (Wickstrom et al. (1988); Anfossi et al. (1989)). These experiments were performed in vitro by incubating cells with the oligoribonucleotide. A similar procedure for in vivo use is described in WO 91/15580. Briefly, a pair of oligonucleotides for a given antisense RNA is produced as follows: A sequence complimentary to the first 15 bases of the open reading frame is flanked by an EcoR1 site on the 5 end and a HindIII site on the 3 end. Next, the pair of oligonucleotides is heated at 90° C. for one minute and then annealed in 2× ligation buffer (20 mM TRIS HCl pH 7.5, 10 mM MgCl2, 10 MM dithiothreitol (DTT) and 0.2 mM ATP) and then ligated to the EcoR1/Hind III site of the retroviral vector PMV7 (WO 91/15580).

[0289] For example, the 5′ coding portion of a polynucleotide that encodes the mature polypeptide of the present invention may be used to design an antisense RNA oligonucleotide of from about 10 to 40 base pairs in length. A DNA oligonucleotide is designed to be complementary to a region of the gene involved in transcription thereby preventing transcription and the production of the receptor. The antisense RNA oligonucleotide hybridizes to the mRNA in vivo and blocks translation of the mRNA molecule into receptor polypeptide. Antisense oligonucleotides may be single or double stranded. Double stranded RNA's may be designed based upon the teachings of Paddison et al., Proc. Nat. Acad. Sci., 99:1443-1448 (2002); and International Publication Nos. WO 01/29058, and WO 99/32619; which are hereby incorporated herein by reference.

[0290] In one embodiment, the antisense nucleic acid of the invention is produced intracellularly by transcription from an exogenous sequence. For example, a vector or a portion thereof, is transcribed, producing an antisense nucleic acid (RNA) of the invention. Such a vector would contain a sequence encoding the antisense nucleic acid of the invention. Such a vector can remain episomal or become chromosomally integrated, as long as it can be transcribed to produce the desired antisense RNA. Such vectors can be constructed by recombinant DNA technology methods standard in the art. Vectors can be plasmid, viral, or others known in the art, used for replication and expression in vertebrate cells. Expression of the sequence encoding a polypeptide of the invention, or fragments thereof, can be by any promoter known in the art to act in vertebrate, preferably human cells. Such promoters can be inducible or constitutive. Such promoters include, but are not limited to, the SV40 early promoter region (Bernoist and Chambon, Nature, 29:304-310 (1981), the promoter contained in the 3′ long terminal repeat of Rous sarcoma virus (Yamamoto et al., Cell, 22:787-797 (1980), the herpes thymidine promoter (Wagner et al., Proc. Natl. Acad. Sci. U.S.A., 78:1441-1445 (1981), the regulatory sequences of the metallothionein gene (Brinster et al., Nature, 296:39-42 (1982)), etc.

[0291] The antisense nucleic acids of the invention comprise a sequence complementary to at least a portion of an RNA transcript of a gene of interest. However, absolute complementarity, although preferred, is not required. A sequence “complementary to at least a portion of an RNA” referred to herein, means a sequence having sufficient complementarity to be able to hybridize with the RNA, forming a stable duplex; in the case of double stranded antisense nucleic acids of the invention, a single strand of the duplex DNA may thus be tested, or triplex formation may be assayed. The ability to hybridize will depend on both the degree of complementarity and the length of the antisense nucleic acid Generally, the larger the hybridizing nucleic acid, the more base mismatches with a RNA sequence of the invention it may contain and still form a stable duplex (or triplex as the case may be). One skilled in the art can ascertain a tolerable degree of mismatch by use of standard procedures to determine the melting point of the hybridized complex.

[0292] Oligonucleotides that are complementary to the 5′ end of the message, e.g., the 5′ untranslated sequence up to and including the AUG initiation codon, should work most efficiently at inhibiting translation. However, sequences complementary to the 3′ untranslated sequences of mRNAs have been shown to be effective at inhibiting translation of mRNAs as well. See generally, Wagner, R., Nature, 372:333-335 (1994). Thus, oligonucleotides complementary to either the 5′- or 3′-non-translated, non-coding regions of a polynucleotide sequence of the invention could be used in an antisense approach to inhibit translation of endogenous mRNA. Oligonucleotides complementary to the 5′ untranslated region of the mRNA should include the complement of the AUG start codon. Antisense oligonucleotides complementary to mRNA coding regions are less efficient inhibitors of translation but could be used in accordance with the invention. Whether designed to hybridize to the 5′-, 3′- or coding region of mRNA, antisense nucleic acids should be at least six nucleotides in length, and are preferably oligonucleotides ranging from 6 to about 50 nucleotides in length. In specific aspects the oligonucleotide is at least 10 nucleotides, at least 17 nucleotides, at least 25 nucleotides or at least 50 nucleotides.

[0293] The polynucleotides of the invention can be DNA or RNA or chimeric mixtures or derivatives or modified versions thereof, single-stranded or double-stranded. The oligonucleotide can be modified at the base moiety, sugar moiety, or phosphate backbone, for example, to improve stability of the molecule, hybridization, etc. The oligonucleotide may include other appended groups such as peptides (e.g., for targeting host cell receptors in vivo), or agents facilitating transport across the cell membrane (see, e.g., Letsinger et al., Proc. Natl. Acad. Sci. U.S.A., 86:6553-6556 (1989); Lemaitre et al., Proc. Natl. Acad. Sci., 84:648-652 (1987); PCT Publication NO: WO 88/09810, published Dec. 15, 1988) or the blood-brain barrier (see, e.g., PCT Publication No. WO 89/10134, published Apr. 25, 1988), hybridization-triggered cleavage agents. (See, e.g., Krol et al., BioTechniques, 6:958-976 (1988)) or intercalating agents (see, e.g., Zon, Pharm. Res., 5:539-549 (1988)). To this end, the oligonucleotide may be conjugated to another molecule, e.g., a peptide, hybridization triggered cross-linking agent, transport agent, hybridization-triggered cleavage agent, etc.

[0294] Double stranded RNA's may be designed based upon the teachings of Paddison et al., Proc. Nat. Acad. Sci., 99:1443-1448 (2002); and International Publication Nos. WO 01/29058, and WO 99/32619; which are hereby incorporated herein by reference.

[0295] SiRNA reagents are specifically contemplated by the present invention. Such reagents are useful for inhibiting expression of the polynucleotides of the present invention and may have therapeutic efficacy. Several methods are known in the art for the therapeutic treatment of disorders by the administration of siRNA reagents. One such method is described by Tiscornia et al (Proc. Nat. Acad. Sci., 100(4):1844-1848 (2003)), which is incorporated by reference herein in its entirety.

[0296] The antisense oligonucleotide may comprise at least one modified base moiety which is selected from the group including, but not limited to, 5-fluorouracil, 5-bromouracil, 5-chlorouracil, 5-iodouracil, hypoxanthine, xanthine, 4-acetylcytosine, 5-(carboxyhydroxylmethyl)uracil, 5-carboxymethylaminomethyl-2-thiouridine, 5-carboxymethylaminomethyluracil, dihydrouracil, beta-D-galactosylqueosine, inosine, N6-isopentenyladenine, 1-methylguanine, 1-methylinosine, 2,2-dimethylguanine, 2-methyladenine, 2-methylguanine, 3-methylcytosine, 5-methylcytosine, N6-adenine, 7-methylguanine, 5-methylaminomethyluracil, 5-methoxyaminomethyl-2-thiouracil, beta-D-mannosylqueosine, 5′-methoxycarboxymethyluracil, 5-methoxyuracil, 2-methylthio-N6-isopentenyladenine, uracil-5-oxyacetic acid, wybutoxosine, pseudouracil, queosine, 2-thiocytosine, 5-methyl-2-thiouracil, 2-thiouracil, 4-thiouracil, 5-methyluracil, uracil-5-oxyacetic acid methylester, uracil-5-oxyacetic acid, 5-methyl-2-thiouracil, 3-(3-amino-3-N-2-carboxypropyl) uracil, (acp3)w, and 2,6-diaminopurine.

[0297] The antisense oligonucleotide may also comprise at least one modified sugar moiety selected from the group including, but not limited to, arabinose, 2-fluoroarabinose, xylulose, and hexose.

[0298] In yet another embodiment, the antisense oligonucleotide comprises at least one modified phosphate backbone selected from the group including, but not limited to, a phosphorothioate, a phosphorodithioate, a phosphoramidothioate, a phosphoramidate, a phosphordiamidate, a methylphosphonate, an alkyl phosphotriester, and a formacetal or analog thereof.

[0299] In yet another embodiment, the antisense oligonucleotide is an a-anomeric oligonucleotide. An a-anomeric oligonucleotide forms specific double-stranded hybrids with complementary RNA in which, contrary to the usual b-units, the strands run parallel to each other (Gautier et al., Nucl. Acids Res., 15:6625-6641 (1987)). The oligonucleotide is a 2-0-methylribonucleotide (Inoue et al., Nucl. Acids Res., 15:6131-6148 (1987)), or a chimeric RNA-DNA analogue (Inoue et al., FEBS Lett., 215:327-330 (1987)).

[0300] Polynucleotides of the invention may be synthesized by standard methods known in the art, e.g., by use of an automated DNA synthesizer (such as are commercially available from Biosearch, Applied Biosystems, etc.). As examples, phosphorothioate oligonucleotides may be synthesized by the method of Stein et al. (Nucl. Acids Res., 16:3209 (1988)), methylphosphonate oligonucleotides can be prepared by use of controlled pore glass polymer supports (Sarin et al., Proc. Natl. Acad. Sci. U.S.A., 85:7448-7451 (1988)), etc.

[0301] While antisense nucleotides complementary to the coding region sequence of the invention could be used, those complementary to the transcribed untranslated region are most preferred.

[0302] Potential antagonists according to the invention also include catalytic RNA, or a ribozyme (See, e.g., PCT International Publication WO 90/11364, published Oct. 4, 1990; Sarver et al, Science, 247:1222-1225 (1990). While ribozymes that cleave mRNA at site specific recognition sequences can be used to destroy mRNAs corresponding to the polynucleotides of the invention, the use of hammerhead ribozymes is preferred. Hammerhead ribozymes cleave mRNAs at locations dictated by flanking regions that form complementary base pairs with the target mRNA. The sole requirement is that the target mRNA have the following sequence of two bases: 5′-UG-3′. The construction and production of hammerhead ribozymes is well known in the art and is described more fully in Haseloff and Gerlach, Nature, 334:585-591 (1988). There are numerous potential hammerhead ribozyme cleavage sites within each nucleotide sequence disclosed in the sequence listing. Preferably, the ribozyme is engineered so that the cleavage recognition site is located near the 5′ end of the mRNA corresponding to the polynucleotides of the invention; i.e., to increase efficiency and minimize the intracellular accumulation of non-functional mRNA transcripts.

[0303] As in the antisense approach, the ribozymes of the invention can be composed of modified oligonucleotides (e.g., for improved stability, targeting, etc.) and should be delivered to cells which express the polynucleotides of the invention in vivo. DNA constructs encoding the ribozyme may be introduced into the cell in the same manner as described above for the introduction of antisense encoding DNA. A preferred method of delivery involves using a DNA construct “encoding” the ribozyme under the control of a strong constitutive promoter, such as, for example, pol III or pol II promoter, so that transfected cells will produce sufficient quantities of the ribozyme to destroy endogenous messages and inhibit translation. Since ribozymes unlike antisense molecules, are catalytic, a lower intracellular concentration is required for efficiency.

[0304] Antagonist/agonist compounds may be employed to inhibit the cell growth and proliferation effects of the polypeptides of the present invention on neoplastic cells and tissues, i.e., stimulation of angiogenesis of tumors, and, therefore, retard or prevent abnormal cellular growth and proliferation, for example, in tumor formation or growth.

[0305] The antagonist/agonist may also be employed to prevent hyper-vascular diseases, and prevent the proliferation of epithelial lens cells after extracapsular cataract surgery. Prevention of the mitogenic activity of the polypeptides of the present invention may also be desirous in cases such as restenosis after balloon angioplasty.

[0306] The antagonist/agonist may also be employed to prevent the growth of scar tissue during wound healing.

[0307] The antagonist/agonist may also be employed to treat, prevent, and/or diagnose the diseases described herein.

[0308] Thus, the invention provides a method of treating or preventing diseases, disorders, and/or conditions, including but not limited to the diseases, disorders, and/or conditions listed throughout this application, associated with overexpression of a polynucleotide of the present invention by administering to a patient (a) an antisense molecule directed to the polynucleotide of the present invention, and/or (b) a ribozyme directed to the polynucleotide of the present invention.

### REFERENCES

[0309] 1. Jemal, A. et al., “Cancer statistics, 2006”, CA Cancer J. Clin., 56:106-130 (2006).
[0310] 2. Denmeade, S. R. et al., “A history of prostate cancer treatment”, Nat. Rev. Cancer, 2:389-396 (2002).
[0311] 3. Tannock, I. F. et al., “Docetaxel plus prednisone or mitoxantrone plus prednisone for advanced prostate cancer”, N. Engl. J. Med., 351:1502-1512 (2004).
[0312] 4. Lombardo, L. J. et al., “Discovery of N-(2-chloro-6-methyl-phenyl)-2-(6-(4-(2-hydroxyethyl)-piperazin-1-yl)-2-methylpyrimidin-4-ylamino)thiazole-5-carboxamide (BMS-354825), a dual Src/Abl kinase inhibitor with potent antitumor activity in preclinical assays”, J. Med. Chem., 47:6658-6661 (2004).
[0313] 5. Huang, F. et al., “Identification of candidate molecular markers predicting sensitivity in solid tumors to dasatinib: rationale for patient selection”, Cancer Res., 67(5):2226-2238 (2007).
[0314] 6. Shah, N. P. et al., “Overriding imatinib resistance with a novel ABL kinase inhibitor”, Science, 305:399-401 (2004).
[0315] 7. Talpaz, M. et al., “Dasatinib in imatinib-resistant Philadelphia chromosome-positive leukemias”, N. Engl. J. Med., 354:2531-2541 (2006).
[0316] 8. Yeatman, T. J., “A renaissance for SRC”, Nat. Rev. Cancer, 4:470-480 (2004).
[0317] 9. Ishizawar, R. et al., “c-Src and cooperating partners in human cancer”, Cancer Cell, 6:209-214 (2004).
[0318] 10. Pegram, M. D. et al., “Phase II study of receptor-enhanced chemosensitivity using recombinant humanized anti-p185HER2/neu monoclonal antibody plus cisplatin in patients with HER2/neu-overexpressing metastatic breast cancer refractory to chemotherapy treatment”, J. Clin. Oncol., 16:2659-2671 (1998).
[0319] 11. Castro, M., “The simpleton's error in drug development”, J. Clin. Oncol., 20:4606-4607 (2002).
[0320] 12. Betensky, R. A. et al., “Influence of unrecognized molecular heterogeneity on randomized clinical trials”, J. Clin. Oncol., 20:2495-2499 (2002).
[0321] 13. Sirotnak, F. M. et al., “Efficacy of cytotoxic agents against human tumor xenografts is markedly enhanced by coadministration of ZD1839 (Iressa), an inhibitor of EGFR tyrosine kinase”, Clin. Cancer Res., 6:4885-4892 (2000).
[0322] 14. Ciardiello, F. et al., “Inhibition of growth factor production and angiogenesis in human cancer cells by ZD1839 (Iressa), a selective epidermal growth factor receptor tyrosine kinase inhibitor”, Clin. Cancer Res., 7:1459-1465 (2001).
[0323] 15. Walker-Daniels, J. et al., “Overexpression of the EphA2 tyrosine kinase in prostate cancer”, Prostate, 41:275-280 (1999).
[0324] 16. Bell, S. M. et al., “Plasminogen activator gene expression is induced by the src oncogene product and tumor promoters”, J. Biol. Chem., 265:1333-1338 (1990).
[0325] 17. Singh, D. et al., “Gene expression correlates of clinical prostate cancer behavior”, Cancer Cell, 1:203-209 (2002).
[0326] 18. Marker, P. C. et al., “Hormonal, cellular, and molecular control of prostatic development”, Dev. Biol., 253:165-174 (2003).
[0327] 19. Litvinov, I. V. et al., “Low-calcium serum-free defined medium selects for growth of normal prostatic epithelial stem cells”, Cancer Res., 66:8598-8607 (2006).
[0328] 20. Guo, L. et al., “Rat toxicogenomic study reveals analytical consistency across microarray platforms”, Nat. Biotechnol., 24:1162-1169 (2006).
[0329] 21. Goldenberg-Furmanov, M. et al., “Lyn is a target gene for prostate cancer: sequence-based inhibition induces regression of human tumor xenografts”, Cancer Res., 64:1058-1066 (2004).
[0330] 22. Sorlie, T. et al., “Repeated observation of breast tumor subtypes in independent gene expression data sets”, Proc. Natl. Acad. Sci. USA, 100:8418-8423 (2003).
[0331] 23. Perou, C. M. et al., “Molecular portraits of human breast tumours”, Nature, 406:747-752 (2000).
[0332] 24. Lapointe, J. et al., “Gene expression profiling identifies clinically relevant subtypes of prostate cancer”, Proc. Natl. Acad. Sci. USA, 101:811-816 (2004).
[0333] 25. Abate-Shen, C. et al., “Molecular genetics of prostate cancer”, Genes Dev., 14:2410-2434 (2000).
[0334] 26. Patrawala, L. et al., “Highly purified CD44+ prostate cancer cells from xenograft human tumors are enriched in tumorigenic and metastatic progenitor cells”, Oncogene, 25:1696-1708 (2006).
[0335] 27. van Bokhoven, A. et al., “Molecular characterization of human prostate carcinoma cell lines”, Prostate, 57:205-225 (2003).
[0336] 28. Chen, C. D. et al., “Molecular determinants of resistance to antiandrogen therapy”, Nat. Med., 10:33-39 (2004).
[0337] 29. Guo, Z. et al., “Regulation of androgen receptor activity by tyrosine phosphorylation”, Cancer Cell, 10:309-319 (2006).
[0338] 30. Fan, C. et al., “Concordance among gene-expression-based predictors for breast cancer”, N. Engl. J. Med., 355:560-569 (2006).
[0339] 31. Cozzi, P. J. et al., “Evaluation of urokinase plasminogen activator and its receptor in different grades of human prostate cancer”, Hum. Pathol., 37:1442-1451 (2006).
[0340] 32. Rocchi, P. et al., “Molecular analysis integrating different pathways associated with androgen-independent progression in LuCaP 23.1 xenograft”, Oncogene, 23:9111-9119 (2004).
[0341] 33. Miyake, H. et al., “Elevation of urokinase-type plasminogen activator and its receptor densities as new predictors of disease progression and prognosis in men with prostate cancer”, Int. J. Oncol., 14:535-541 (1999).
[0342] 34. Urban, P. et al., “Increased expression of urokinase-type plasminogen activator mRNA determines adverse prognosis in ErbB2-positive primary breast cancer”, J. Clin. Oncol., 24:4245-4253 (2006).
[0343] 35. Janicke, F. et al., “Randomized adjuvant chemotherapy trial in high-risk, lymph node-negative breast cancer patients identified by urokinase-type plasminogen activator and plasminogen activator inhibitor type 1”, J. Natl. Cancer Inst., 93:913-920 (2001).
[0344] 36. Nam, S. et al., “Action of the Src family kinase inhibitor, dasatinib (BMS-354825), on human prostate cancer cells”, Cancer Res., 65:9185-9189 (2005).
[0345] 37. Thomas, S. M., “Cellular functions regulated by Src family kinases”, Annu. Rev. Cell Dev. Biol., 13:513-609 (1997).

### EXAMPLES

[0346] The Examples herein are meant to exemplify the various aspects of carrying out the invention and are not intended to limit the scope of the invention in any way. The Examples do not include detailed descriptions for conventional methods employed, such as in the construction of vectors, the insertion of cDNA into such vectors, or the introduction of the resulting vectors into the appropriate host. Such methods are well known to those skilled in the art and are described in numerous publications, for example, Sambrook, Fritsch, and Maniatis, Molecular Cloning: A Laboratory Manual, 2nd Ed., Cold Spring Harbor Laboratory Press, USA, (1989).

### Example 1

### Methods

### Cell Lines and Cell Culture

[0347] All cell lines were obtained from the American Type Culture Collection (Manassas, Va.), except DUCaP, which was obtained from Dr. Kenneth Pienta at University of Michigan. PWR1E and MDAPCa2b cells were grown in BRFF-HPC1 serum-free medium (AthenaES, Baltimore, Md.), and all other cells were cultured in RPMI 1640 supplemented with 10% fetal bovine serum, 100 IU/ml penicillin, and 100 mg/ml streptomycin (Invitrogen, Carlsbad, Calif.). DUCaP cells were maintained in the presence of an immortalized mouse fibroblast cell line, which formed a layer beneath DUCaP cells that easily dislodged. Cells were incubated at 37° C. with circulation of 5% CO₂.

### In Vitro Cell Proliferation Assay

[0348] The effect of BMS-A (dasatinib) treatment on cell proliferation was measured using a MTS colorimetric method (Promega, Madison, Wis.). The optimum number of cells to seed in 96-well plates to achieve linearity were determined in pilot experiments. Cells were plated at density of 2000-5000 cells/well into 96-well plates and cultured overnight. Cells were then treated with dasatinib at serially diluted concentrations. Three days later, MTS was added to the medium and quantified on a SPECTRAMAX® photometric plate reader (Molecular Devices, Sunnyvale, Calif.) at 490 nm. The results were plotted against drug concentrations and IC₅₀s were calculated using Prism4 software (GraphPad, San Diego, Calif.). The IC₅₀ was the concentration of dasatinib that would reduce cell proliferation by 50% compared to control. Minimum three independent assays were performed for each cell line. The mean±standard deviation (SD) were calculated except for cell lines that were highly resistant to the compound where accurate IC₅₀s were hard to obtain. In the latter case, the concentration of dasatinib that was able to consistently reduce cell proliferation was used as IC₅₀. The inhibition of dasatinib on cell growth was also visually confirmed under microscope. Dasatinib stock, dissolved in DMSO, was 10 mg/ml.

### Microarray Analysis

[0349] AFFYMETRIX® HG-U133v2 gene chips containing ˜22,000 probe sets were used for gene expression profiling (Affymetrix, Santa Clara, Calif.). Total RNA was isolated from the cells using the RNeasy kits (Qiagen, Valencia, Calif.). The quality of the RNA was assessed using an Agilent 2100 Bioanalyzer (Agilent, Santa Clara, Calif.). Ten μg of total RNA was used for the preparation of biotin-labeled cRNA. Chip hybridization, scanning and data acquisition were performed according to the Expression Analysis Technical Manual provided by the manufacturer.

### Data Analysis

[0350] The raw expression data were normalized using an RMA algorithm and analyzed in PARTEK® Discovery Suite software (Partek, St Louis, Mo.). Two statistical analyses including 1-way ANOVA for comparison of gene expression between sensitive and resistant cell line groups, and Pearson correlation between gene expression level and log₂IC₅₀ values were performed to identify genes whose baseline expression levels correlated with the sensitivity to dasatinib in 16 prostate cell lines (p value<0.05 in both analyses). The gene list was further narrowed down by variation filters (10% coefficient of variation of gene expression values across all samples and minimum 3-fold differential expression between sensitive and resistant cell groups as defined by IC₅₀). ESTs and gene duplicates were eliminated from the final list. Gene expression profiles of drug treated (100 nM for 2 days) cell lines were compared with those of DMSO control using paired t-test (p value<0.05). Clustering analysis was performed using GeneCluster software and heatmaps were generated with red and green indicating high or low expression respectively.

### Western Blot Analysis

[0351] Cell lysates were prepared from asynchronously growing cells using the RIPA buffer supplemented with protease (Roche Diagnostics, Indianapolis, Ind.) and phosphatase inhibitor (Sigma, St. Louis, Mo.) cocktails. Protein concentration was determined using the BCA kit (Pierce, Rockford, Ill.). Thirty μg of lystate was loaded and resolved on NUPAGE® Novex 4-12% Bis-Tris gel (Invitrogen, Carlsbad, Calif.). The blots were probed with mouse monoclonal anti-EphA2 (Upstate Biotechnology, Lake Placid, N.Y.) and anti-tubulin antibodies (Abcam, Cambridge, Mass.) and developed with chemiluminescence reagent ECL PLUS® (GE Healthcare, Piscataway, N.J.).

### uPA Protein Elisa Assay

[0352] Cell were seeded in 24-well plates at density of 25,000 cells/well. Two days later, the cells were washed twice with PBS and the medium was changed to RPMI 1640 containing 0.1% FBS and different concentrations of dasatinib or TAXOL®. Medium was sampled at 0, 2, 4, 8, 24, and 48 hours and immediately centrifuged at 10,000 g for 5 min. The supernatants were frozen at −80° C. until analysis. Total number of cells were also quantitated using a cell counter, and the number of viable cells were assessed with Trypan Blue. The amount of uPA protein in the supernatant was determined using the uPA ELISA kit (America Diagnostica, Stamford, Conn.), and the concentrations of uPA secreted by 50,000 viable cells into the medium were calculated.

### Example 2

### Down-Regulation of uPA Protein Level in Plasma Correlated with Reduced Growth of PC3 Xenograft Tumors Induced by Dasatinib

[0353] In an effort to confirm that uPA can be used as a surrogate marker for reduced tumor growth, the uPA protein level in the plasma of mice bearing PC3 xenograft tumors in the absence or presence of dasatinib was examined Xenograft tumors were established subcutaneously in nu/nu athymic mice. The mice were divided into three groups each with 8 mice after tumors had reached approximately 200 mg. Two groups were treated with dasatinib at 15 or 30 mg/kg respectively, and the third group as control did not receive dasatinib. Dasatinib was administered orally twice a day on a 5-day-on 2-day-off schedule for 20 doses. The tumor size measurement and blood sampling were performed prior to treatment and weekly for two weeks after treatment initiation. Tumor weight was determined using the following equation: tumor weight=(length*width²)/2. It is noted the ELISA kit used only detects human but not mouse uPA protein (data not shown). As expected, PC3 xenograft tumor growth was inhibited by dasatinib at the two dose levels tested, although 30 mg/kg did not show higher tumor growth inhibition activity than the 15 mg/kg. The plasma uPA level was markedly reduced following first week of dasatinib treatment especially at 30 mg/kg (˜30%). Although the magnitude of such down-regulation decreased as tumor progressed into second week, the trend remained. Since dasatinib in combination with paclitaxel demonstrated higher antitumor activity in preclinical models than single agent, down-regulation of uPA may occur with greater magnitude and thus may better be used as a surrogate marker in combination studies. This finding is of particular importance when tumor measurement is unpractical such as in metastatic tumors.

[0354] These findings represent a second use for uPA expression profiles. As outlined herein, low levels of uPA expression in a sample correlate with an increased likelihood the sample will be at least partially resistant to a protein tyrosine kinase inhibitor. But, when uPA expression levels are elevated or at least normal, there is an increased likelihood the sample will be sensitive to protein tyrosine kinase inhibitor. In this instance, the cell line tested using xenograft transplantation was a sensitive cell line which responded to treatment with a protein tyrosine kinase inhibitor by showing deceased uPA expression. Such deceased expression further confirms that uPA represents a sensitive marker to protein tyrosine kinase inhibitor and may be used as a surrogate to measure efficacious treatment.

### Example 3

### PCR Expression Profiling

[0355] RNA quantification is performed using the TAQMAN® real-time-PCR fluorogenic assay. The TAQMAN® assay is one of the most precise methods for assaying the concentration of nucleic acid templates.

[0356] RNA is prepared using standard methods, preferably, employing the RNeasy Maxi Kit commercially available from Qiagen (Valencia, Calif.). A cDNA template for real-time PCR can be generated using the SUPERSCRIPT® First Strand Synthesis system for RT-PCR. Representative forward and reverse RT-PCT primers for each of the protein tyrosine kinase biomarker polynucleotides of the present invention are provided in Table 6 (SEQ ID NO:357-887).

[0357] SYBR® Green real-time PCR reactions are prepared as follows: The reaction mix contains 20 ng first strand cDNA; 50 nM Forward Primer; 50 nM Reverse Primer; 0.75×SYBR® Green I (Sigma); 1×SYBR® Green PCR Buffer (50 mM Tris-HCl pH 8.3, 75 mM KCl); 10% DMSO; 3 mM MgCl₂; 300 μM each dATP, dGTP, dTTP, dCTP; 1 U PLATINUM® Taq DNA Polymerase High Fidelity (Cat# 11304-029; Life Technologies; Rockville, Md.). Real-time PCR is performed using an Applied Biosystems 5700 Sequence Detection System. Conditions are 95° C. for 10 minutes (denaturation and activation of PLATINUM® Taq DNA Polymerase), 40 cycles of PCR (95° C. for 15 seconds, 60° C. for 1 minute). PCR products are analyzed for uniform melting using an analysis algorithm built into the 5700 Sequence Detection System.

[0358] cDNA quantification used in the normalization of template quantity is performed using TAQMAN® technology. TAQMAN® reactions are prepared as follows: The reaction mix comprises 20 ng first strand cDNA; 25 nM GAPDH-F3, Forward Primer; 250 nM GAPDH-R1 Reverse Primer; 200 nM GAPDH-PVIC TAQMAN® Probe (fluorescent dye labeled oligonucleotide primer); 1× Buffer A (Applied Biosystems); 5.5 mM MgCl₂; 300 μM dATP, dGTP, dTTP, dCTP; and 1 U AMPLITAQ GOLD® (Applied Biosystems). GAPDH (D-glyceraldehyde-3-phosphate dehydrogenase) is used as a control to normalize mRNA levels. Real-time TAQMAN® PCR is performed using an Applied Biosystems 7700 Sequence Detection System. Conditions are 95° C. for 10 minutes (denaturation and activation of AMPLITAQ GOLD®), 40 cycles of PCR (95° C. for 15 seconds, 60° C. for 1 minute).

[0359] The sequences for the GAPDH oligonucleotides used in the TAQMAN® reactions are as follows:

(SEQ ID NO: 888)

GAPDH-F3: 5′-AGCCGAGCCACATCGCT-3′;

(SEQ ID NO: 889)

GAPDH-R1: 5′-GTGACCAGGCGCCCAATAC-3′;
and

(SEQ ID NO: 890)

GAPDH-PVIC TAQMAN ® Probe-VIC-5′-
CAAATCCGTTGACTCCGACCTTCACCTT-3′ TAMRA.

[0360] The Sequence Detection System generates a Ct (threshold cycle) value that is used to calculate a concentration for each input cDNA template. cDNA levels for each polynucleotide of interest are normalized to GAPDH cDNA levels to compensate for variations in total cDNA quantity in the input sample. This is done by generating GAPDH Ct values for each cell line. Ct values for the polynucleotide of interest and GAPDH are inserted into a modified version of the δδCt equation (Applied Biosystems PRISM® 7700 Sequence Detection System User Bulletin #2), which is used to calculate a GAPDH normalized relative cDNA level for each specific cDNA. The δδCt equation is as follows: relative quantity of nucleic acid template=2^{δδct}=2^{(δCta-δCtb)}, where δCta=Ct target−Ct GAPDH, and δCtb=Ct reference−Ct GAPDH. (No reference cell line is used for the calculation of relative quantity; δCtb is defined as 21).

### Example 4

### Production of an Antibody Directed Against Protein Tyrosine Kinase Biomarker Polypeptides

[0361] Anti-protein tyrosine kinase biomarker polypeptide antibodies of the present invention can be prepared by a variety of methods as detailed hereinabove. As one example of an antibody-production method, cells expressing a polypeptide of the present invention are administered to an animal as immunogen to induce the production of sera containing polyclonal antibodies directed against the expressed polypeptide. In a preferred method, the expressed polypeptide is prepared, preferably isolated and/or purified, to render it substantially free of natural contaminants using techniques commonly practiced in the art. Such a preparation is then introduced into an animal in order to produce polyclonal antisera of greater specific activity for the expressed and isolated polypeptide.

[0362] In a most preferred method, the antibodies of the present invention are monoclonal antibodies (or protein binding fragments thereof) and can be prepared using hybridoma technology as detailed hereinabove. Cells expressing the polypeptide can be cultured in any suitable tissue culture medium; however, it is frequently preferable to culture cells in Earle's modified Eagle's medium supplemented to contain 10% fetal bovine serum (inactivated at about 56° C.), and supplemented to contain about 10 g/l nonessential amino acids, about 1.0 U/ml penicillin, and about 100 μg/ml streptomycin.

[0363] The splenocytes of immunized (and boosted) mice are extracted and fused with a suitable myeloma cell line. Any suitable myeloma cell line can be employed in accordance with the present invention; however, it is preferable to employ the parent myeloma cell line SP2/0, available from the ATCC®. After fusion, the resulting hybridoma cells are selectively maintained in HAT medium, and then cloned by limiting dilution as described, for example, by Wands et al. (Gastroenterology, 80:225-232 (1981)). The hybridoma cells obtained through such a selection process are then assayed to identify those cell clones that secrete antibodies capable of binding to the polypeptide immunogen, or a portion thereof.

[0364] Alternatively, additional antibodies capable of binding to the polypeptide can be produced in a two-step procedure using anti-idiotypic antibodies. Such a method makes use of the fact that antibodies are themselves antigens, and therefore, it is possible to obtain a second antibody that binds to a first antibody. In accordance with this method, protein-specific antibodies are used to immunize an animal, preferably a mouse. The splenocytes of such an immunized animal are then used to produce hybridoma cells, and the hybridoma cells are screened to identify clones that produce an antibody whose ability to bind to the protein-specific antibodies can be blocked by the protein. Such antibodies comprise anti-idiotypic antibodies to the protein-specific antibody and can be used to immunize an animal to induce the formation of further protein-specific antibodies.

[0365] For in vivo use of antibodies in humans, it may be preferable to use “humanized” chimeric monoclonal antibodies. Such antibodies can be produced using genetic constructs derived from hybridoma cells producing the monoclonal antibodies described above. Methods for producing chimeric antibodies are known and practiced in the art. (See, e.g., for review, Morrison, Science, 229:1202 (1985)); Oi et al., BioTechniques, 4:214 (1986); Cabilly et al., U.S. Pat. No. 4,816,567; Taniguchi et al., EP 171496; Morrison et al., EP 173494; Neuberger et al., WO 8601533; Robinson et al., WO 87/02671; Boulianne et al., Nature, 312:643 (1984); and Neuberger et al., Nature, 314:268 (1985)).

### Example 5

### Immunofluorescence Assays

[0366] The following immunofluorescence protocol can be used, for example, to verify protein tyrosine kinase biomarker expression in cells, or, for example, to check for the presence of one or more antibodies that bind protein tyrosine kinase biomarkers (polypeptides or peptides) expressed on the surfaces of cells. Briefly, LAB-TEK® II chamber slides are coated overnight at 4° C. with 10 μg/ml of bovine collagen Type II in DPBS containing calcium and magnesium (DPBS++). The slides are then washed twice with cold DPBS++ and seeded with approximately 8000 CHO cells transfected with a vector comprising the coding sequence for a protein tyrosine kinase biomarker of the present invention or with CHO cells transfected with vector alone (control) in a total volume of 125 μl and incubated at 37° C. in the presence of 95% oxygen/5% carbon dioxide.

[0367] Thereafter, the culture medium is gently removed by aspiration and the adherent cells are washed twice with DPBS++ at ambient temperature. The slides are blocked with DPBS++ containing 0.2% BSA (blocker) at 0-4° C. for one hour. The blocking solution is gently removed by aspiration, and 125 μl of antibody containing solution (an antibody containing solution may be, for example, a hybridoma culture supernatant which is usually used undiluted, or serum/plasma which is usually diluted, e.g., a dilution of about 1:50, 1:100, 1:1000, and the like). The slides are incubated for 1 hour at 0-4° C. Antibody solutions are then gently removed by aspiration and the cells are washed 5 times with 400 μl of ice cold blocking solution. Next, 125 μl of 1 μg/ml rhodamine labeled secondary antibody (e.g., anti-human IgG) in blocker solution is added to the cells. Again, cells are incubated for 1 hour at 0-4° C.

[0368] The secondary antibody solution is then gently removed by aspiration and the cells are washed 3 times with 400 μl of ice cold blocking solution, and 5 times with cold DPBS++. The cells are then fixed with 125 μl of 3.7% formaldehyde in DPBS++ for 15 minutes at ambient temperature. Thereafter, the cells are washed 5 times with 400 μl of DPBS++ at ambient temperature. Finally, the cells are mounted in 50% aqueous glycerol and viewed using a fluorescence microscope using rhodamine filters.

### Example 6

### Complimentary Sequences

[0369] Antisense molecules or nucleic acid sequences complementary to the protein tyrosine kinase biomarker polypeptides-encoding sequence, or any part thereof, is used to decrease or to inhibit the expression of naturally occurring protein tyrosine kinase biomarker polypeptides. Although the use of antisense or complementary oligonucleotides comprising about 15 to 35 base-pairs is described, essentially the same procedure is used with smaller or larger nucleic acid sequence fragments. An oligonucleotide based on the coding sequence of protein tyrosine kinase biomarker polypeptides, as depicted in SEQ ID NO:1 to 356, for example, is used to inhibit expression of naturally occurring protein tyrosine kinase biomarker polypeptides. The complementary oligonucleotide is typically designed from the most unique 5′ sequence and is used either to inhibit transcription by preventing promoter binding to the coding sequence, or to inhibit translation by preventing the ribosome from binding to the protein tyrosine kinase biomarker polypeptides-encoding transcript, among others. However, other regions may also be targeted.

[0370] Using an appropriate portion of the signal and 5′ sequence of SEQ ID NO:1 to 356, an effective antisense oligonucleotide includes any of about 15-35 nucleotides spanning the region which translates into the signal or 5′ coding sequence, among other regions, of the polypeptide as depicted in SEQ ID NO:1 to 356. Appropriate oligonucleotides may be designed using OLIGO 4.06 software and the protein tyrosine kinase biomarker polypeptides coding sequence (SEQ ID NO:1 to 356). Preferred oligonucleotides are deoxynucleotide, or chimeric deoxynucleotide/ribonucleotide based and are provided below. The oligonucleotides may be synthesized using chemistry essentially as described in U.S. Pat. No. 5,849,902; which is hereby incorporated herein by reference in its entirety. Representative RNAi reagent sequences are as follows:

| | | SEQ | | SEQ |
|---|---|---|---|---|
| | | ID | | ID |
| Target Name | Sense Strand RNAi Reagent | NO: | Anti-Sense Strand RNAi Reagent | NO: |
| caveolin 1-1 | CAGGGCAACAUCUACAAGCTT | 891 | GCUUGUAGAUGUUGCCCUGTT | 903 |
| caveolin 1-2 | GCAAGUGUACGACGCGCACTT | 892 | GUGCGCGUCGUACACUUGCTT | 904 |
| caveolin 1-3 | CCGCUUGCUGUCUGCCCUCTT | 893 | GAGGGCAGACAGCAAGCGGTT | 905 |
| caveolin 1-4 | CAUCUGGGCAGUUGUACCATT | 894 | UGGUACAACUGCCCAGAUGTT | 906 |
| caveolin 2-1 | CUACGCACUCCUUUGACAATT | 895 | UUGUCAAAGGAGUGCGUAGTT | 907 |
| caveolin 2-2 | AGUGUGGAUCUGCAGCCAUTT | 896 | AUGGCUGCAGAUCCACACUTT | 908 |
| caveolin 2-3 | GUUCCUGACGGUGUUCCUGTT | 897 | CAGGAACACCGUCAGGAACTT | 909 |
| caveolin 2-4 | UUGCGGGAAUUCUCUUUGCTT | 898 | GCAAAGAGAAUUCCCGCAATT | 910 |
| ephA2-1 | GGAAGUGGUACUGCUGGACTT | 899 | GUCCAGCAGUACCACUUCCTT | 911 |
| ephA2-2 | CUUCCAGAAGCGCCUGUUCTT | 900 | GAACAGGCGCUUCUGGAAGTT | 912 |
| ephA2-3 | GAGCCCCGUAUGCACUGUGTT | 901 | CACAGUGCAUACGGGGCUCTT | 303 |
| ephA2-4 | CUACACCUUCACCGUGGAGTT | 902 | CUCCACGGUGAAGGUGUAGTT | 304 |

Transfection of Post-Quiescent A549 Cells with Antisense Oligonucleotides

[0371] Materials needed:
[0372] A549 cells can be maintained in DMEM with high glucose (Gibco-BRL) supplemented with 10% Fetal Bovine Serum, 2 mM L-Glutamine, and 1× penicillin/streptomycin.
[0373] Opti-MEM (Gibco-BRL)
[0374] Lipofectamine 2000 (Invitrogen)
[0375] Antisense oligomers (Qiagen)
[0376] Polystyrene tubes.
[0377] Tissue culture treated plates.

[0378] Quiescent cells are prepared as follows:
[0379] Day 0: 300,000 A549 cells are seeded in a T75 tissue culture flask in 10 ml of A549 media (as specified above), and incubated in at 37° C., 5% CO₂ in a humidified incubator for 48 hours.
[0380] Day 2: The T75 flasks are rocked to remove any loosely adherent cells, and the A549 growth media removed and replenished with 10 ml of fresh A549 media. The cells are cultured for six days without changing the media to create a quiescent cell population.
[0381] Day 8: Quiescent cells are plated in multi-well format and transfected with antisense oligonucleotides.

[0382] A549 cells are transfected according to the following:

[0383] 1. Trypsinize T75 flask containing quiescent population of A549 cells.

[0384] 2. Count the cells and seed 24-well plates with 60K quiescent A549 cells per well.

[0385] 3. Allow the cells to adhere to the tissue culture plate (approximately 4 hours).

[0386] 4. Transfect the cells with antisense and control oligonucleotides according to the following:
[0387] a. A 10× stock of lipofectamine 2000 (10 ug/ml is 10×) may be prepared, and diluted lipid is allowed to stand at RT for 15 minutes.
[0388] Stock solution of lipofectamine 2000 is 1 mg/ml.
[0389] 10× solution for transfection is 10 ug/ml.
[0390] To prepare 10× solution, dilute 10 ul of lipofectamine 2000 stock per 1 ml of Opti-MEM (serum free media).
[0391] b. A 10× stock of each oligomer may be prepared for use in the transfection.
[0392] Stock solutions of oligomers are at 100 uM in 20 mM HEPES, pH 7.5.
[0393] 10× concentration of oligomer may be 0.25 uM.
[0394] To prepare the 10× solutions, dilute 2.5 ul of oligomer per 1 ml of Opti-MEM.
[0395] c. Equal volumes of the 10× lipofectamine 2000 stock and the 10× oligomer solutions are mixed well, and incubated for 15 minutes at RT to allow complexation of the oligomer and lipid. The resulting mixture is 5×.
[0396] d. After the 15 minute complexation, 4 volumes of full growth media is added to the oligomer/lipid complexes (solution may be 1×).
[0397] e. The media may be aspirated from the cells, and 0.5 ml of the 1× oligomer/lipid complexes added to each well.
[0398] f. The cells are incubated for 16-24 hours at 37° C. in a humidified CO₂ incubator.
[0399] g. Cell pellets are harvested for RNA isolation and TAQMAN® analysis of the expression of the protein tyrosine kinase biomarker polypeptides to assess level of knock-down.

### TAQMAN® Reactions

[0400] Quantitative RT-PCR analysis may be performed on total RNA preps that are treated with DNaseI or poly A selected RNA. The Dnase treatment may be performed using methods known in the art, though preferably using a Qiagen RNeasy kit to purify the RNA samples, wherein DNAse I treatment is performed on the column.

[0401] Briefly, a master mix of reagents may be prepared according to the following table:

Dnase I Treatment

| Reagent | Per r'xn (in uL) |
|---|---|
| 10x Buffer | 2.5 |
| Dnase I (1 unit/ul @1 unit per ug sample) | 2 |
| DEPC H₂O | 0.5 |
| RNA sample @ 0.1 ug/ul | 20 |
| (2-3 ug total) | |
| Total | 25 |

[0402] Next, 5 ul of master mix may be aliquoted per well of a 96-well PCR reaction plate (PE part # N801-0560). RNA samples are adjusted to 0.1 ug/ul with DEPC treated H₂O (if necessary), and 20 ul may be added to the aliquoted master mix for a final reaction volume of 25 ul.

[0403] The wells are capped using strip well caps (PE part # N801-0935), placed in a plate, and briefly spun in a plate centrifuge (Beckman) to collect all volume in the bottom of the tubes. Generally, a short spin up to 500 rpm in a SORVALL® RT is sufficient

[0404] The plates are incubated at 37° C. for 30 mins. Then, an equal volume of 0.1 mM EDTA in 10 mM Tris may be added to each well, and heat inactivated at 70° C. for 5 min. The plates are stored at −80° C. upon completion.

### RT Reaction

[0405] A master mix of reagents may be prepared according to the following table:

RT Reaction

| | RT | No RT |
|---|---|---|
| Reagent | Per Rx'n (in ul) | Per Rx'n (in ul) |
| 10x RT buffer | 5 | 2.5 |
| MgCl₂ | 11 | 5.5 |
| DNTP mixture | 10 | 5 |
| Random Hexamers | 2.5 | 1.25 |
| Rnase inhibitors | 1.25 | 0.625 |
| RT enzyme | 1.25 | — |
| Total RNA 500 ng (100 ng no RT) | 19.0 max | 10.125 max |
| DEPC H₂O | — | — |
| Total | 50 uL | 25 uL |

[0406] Samples are adjusted to a concentration so that 500 ng of RNA is added to each RT rx′n (100 ng for the no RT). A maximum of 19 ul can be added to the RT rx′n mixture (10.125 ul for the no RT.) Any remaining volume up to the maximum values may be filled with DEPC treated H₂O, so that the total reaction volume is 50 ul (RT) or 25 ul (no RT).

[0407] On a 96-well PCR reaction plate (PE part # N801-0560), 37.5 ul of master mix may be aliquoted (22.5 ul of no RT master mix), and the RNA sample added for a total reaction volume of 50 ul (25 ul, no RT). Control samples are loaded into two or even three different wells in order to have enough template for generation of a standard curve.

[0408] The wells are capped using strip well caps (PE part # N801-0935), placed in a plate, and spin briefly in a plate centrifuge (Beckman) to collect all volume in the bottom of the tubes. Generally, a short spin up to 500 rpm in a SORVALL® RT is sufficient.

[0409] For the RT-PCR reaction, the following thermal profile may be used:

[0410] a. 25° C. for 10 min

[0411] b. 48° C. for 30 min

[0412] c. 95° C. for 5 min

[0413] d. 4° C. hold (for 1 hour)

[0414] e. Store plate @−20° C. or lower upon completion.

TAQMAN® reaction (Template Comes from RT Plate)

[0415] A master mix may be prepared according to the following table:

TAQMAN ® reaction (per well)

| Reagent | Per Rx'n (in ul) |
|---|---|
| TAQMAN ® Master Mix | 4.17 |
| 100 uM Probe | .025 |
| 100 uM Forward primer | .05 |
| 100 uM Reverse primer | .05 |
| Template | — |
| DEPC H₂O | 18.21 |
| Total | 22.5 |

[0416] Appropriate forward, reverse, and probe primers may be designed for each protein tyrosine kinase biomarker polypeptides coding region for use in the RT-PCR reaction

[0417] Using a GILSON® P-10 repeat pipetter, 22.5 ul of master mix is aliquouted per well of a 96-well optical plate. Then, using P-10 pipetter, 2.5 ul of sample is added to individual wells. Generally, RT samples are run in triplicate with each primer/probe set used, and no RT samples are run once and only with one primer/probe set, often gapdh (or other internal control).

[0418] A standard curve is then constructed and loaded onto the plate. The curve has five points plus one no template control (NTC, =DEPC treated H₂O). The curve may be made with a high point of 50 ng of sample (twice the amount of RNA in unknowns), and successive samples of 25, 10, 5, and 1 ng. The curve may be made from a control sample(s) (see above).

[0419] The wells are capped using optical strip well caps (PE part # N801-0935), placed in a plate, and spun in a centrifuge to collect all volume in the bottom of the tubes. Generally, a short spin up to 500 rpm in a SORVALL® RT is sufficient.

[0420] Plates are loaded onto a PE 5700 sequence detector making sure the plate is aligned properly with the notch in the upper right hand corner. The lid may be tightened down and run using the 5700 and 5700 quantitation program and the SYBR® probe using the following thermal profile:

[0421] 50° C. for 2 min

[0422] 95° C. for 10 min

[0423] and the following for 40 cycles:
[0424] 95° C. for 15 sec
[0425] 60° C. for 1 min

[0426] Change the reaction volume to 25 ul.

[0427] Once the reaction may be complete, a manual threshold of around 0.1 may be set to minimize the background signal. Additional information relative to operation of the GENEAMP® 5700 machine may be found in reference to the following manuals: “GeneAmp 5700 Sequence Detection System Operator Training CD”; and the “User's Manual for 5700 Sequence Detection System”; available from Perkin-Elmer and hereby incorporated by reference herein in their entirety.

[0428] The skilled artisan would acknowledge that modifications to the above protocol may be required for each protein tyrosine kinase biomarker polypeptide of the present invention. The skilled artisan would also acknowledge that cell lines other than A549 could be used and that A549 are only provided as an example. The skilled artisan would also acknowledge that other means may be used to assess the ability of a complimentary oligonucleotide, such as the RNAi reagents provided in SEQ ID NO:534 to 557, which include, but are not limited to western blots and ELISA assays, among others.

### Example 7

### Alternative Method of Assessing Ability of Complimentary Sequences to Modulate Expression Levels of the Protein Tyrosine Kinase Biomarker Polypeptides of the Present Invention

[0429] Preferred complimentary sequences that may be assessed for their ability to modulate the expression levels the protein tyrosine kinase biomarker polypeptides of the present invention are provided as SEQ ID NO:14 to 37. Other complimentary sequences may be designed based upon the coding region of the protein tyrosine kinase biomarker polypeptides of the present invention as provided as SEQ ID NO:1 to 356, and are specifically contemplated by the present invention.

### Co-Transfection RNAi

### Transfection:

[0430] Day prior to transfection, seed 2×10⁵ HeLa cells per well of a 24 well dish. The following day, cells should be 90-95% confluent. Dilute 4.5 uL of 20 uM stock RNAi (one or more of SEQ ID NO:14 to 37) in 50 uL Optimem in a polystyrene tube for each RNAi to be transfected (tube A). Mix by gentle tapping. In another polystyrene tube combine 2 uL Lipofectamine 2000 with 50 uL Optimem (tube B). Mix by gentle tapping. Allow to sit at RT for 5′. Combine 50 uL tube B with the 50 uL for each tube A. Mix by gentle tapping. Allow to sit at RT for 15′. Add 500 uL serum/antibiotic-free MEM to each tube to give a final RNAi concentration of 150 nM. (For cotransfections of RNAi with plasmid, use 1 uL of 20 uM stock RNAi (final concentration of 33 nM) along with 1 ug vector DNA in tube A, and then proceed with transfection protocol above). Remove the media from HeLa plates and replace with the 600 uL transfection mix. Put in 37° C. 5% CO2 incubator for 4-5 hours. Replace the media with MEM containing 10% FBS.

[0431] Controls to include in the transfection include a fluorescent oligonucleotide control (1 U/uL=20 uM) to calculate transfection efficiency, GFP B as a non-specific negative control, CDC2 as a normalizing knockdown control, and an untransfected control receiving no DNA.

### Lysis:

[0432] 48 hours post-transfection, aspirate media and wash cells 1× with approx. 500 uL cold 1×PBS per well. Aspirate and replace with 100 uL cold RIPA containing protease inhibitors (1 mini BM protease inhibitor tablet/10 mL 1×RIPA). Rock and tap the plate a few times and place at 4° C. for 10-15 minutes. Tap/rock the plate several more times. Using a 200 uL pipetteman, aspirate 5-10 times and wash the well to ensure complete lysis and transfer of all material. Transfer lysate to an eppendorf tube and pipette up and down 5-10 times. If sample is still viscous, pipette up and down several more times. Spin samples down for 10′ at 14000 RPM 4° C. Samples can now be stored at −20° C. or prepared for loading.

### Western Blotting/Novex:

[0433] Prepare sample by combining 20 uL lysate with 3 uL reducing reagent and 7 uL 4× gel loading dye. Heat at 70° C. for 10′ and then place samples on ice. While samples are heating, prepare desired gel (usually a 4-12% Bis-Tris gel) by removing comb and sealing tape. Place gels in gel box and fill inner and outer chambers with desired buffer (either 1×MES or MOPS-Add 50 mL 20× buffer to 950 mL dH20 for each gel box). Add 600 uL Oxidizing reagent to the inner chamber. Wash out each well by blasting with 500 uL buffer. In well one, load 5 uL marker-Invitrogen's SEEBLUE® Plus2. Load samples in subsequent lanes. Run gel at 200V for 45-50 minutes. Make up 1× transfer buffer-50 mL 20× transfer buffer, Methanol (100 mL if transferring one gel, 200 mL if transferring 2 gels in the same apparatus) and dH20 to 1000 mL. Soak blotting pads in dH20 and then transfer buffer—make sure to push down on pads to rid of air bubbles. Soak precut Hybond-ECL membrane (Amersham nitrocellulose) in dH20 and then in transfer buffer. Cut the end off of Biorad filter paper to match size of transfer membrane. If transferring one gel, place 2 blotting pads into blotting chamber. For 2 gels, place down 1 pad. Briefly soak a filter paper in transfer buffer and carefully lay on blotting pad. Open gel cassette with cracking tool, cut off top, bottom and sides of gel. Briefly rinse it in transfer buffer and then lay it on filter paper carefully making sure no air bubbles are present. Lay transfer membrane on top again being careful there are no bubbles. Put down filter paper. Put down 2 blotting pads if transferring one gel to complete the sandwich. If transferring 2, put down 1 blotting pad, filter paper, gel, membrane, filter paper, blotting pad. Gels are now ready for transfer. Squeeze together the gel sandwich and place in transfer apparatus. Fill inner and outer chambers with transfer buffers. Transfer gels for 1 hour at 30V.

[0434] Remove membranes and place them in SUPERBLOCK® (Pierce) and rock at RT for a minimum of 1 hour-overnight. (I have stored membranes in SUPERBLOCK® at 4° C. over the weekend). Primary antibody and normalizing antibody are diluted in a 1:10 mix of SUPERBLOCK®:1×PBS/0.3% Tween-20. Membranes are incubated and rocked at RT in primary antibody for a minimum of 1 hour-overnight. Membranes are then washed thoroughly in 1×PBS/0.3% Tween-20. I usually give several quick rinses and then rinse 3×5′ in 1×PBS/0.3% Tween-20. During the final wash, HRP-conjugated secondary antibody is diluted in 1×PBS/0.3% Tween-20. Add this to membrane and rock at RT for a minimum of 30′. Wash membranes thoroughly. I usually give several quick rinses and then rinse 3×5′ in 1×PBS/0.3% Tween-20. Membranes are removed from wash buffer and the excess buffer drained by holding the edge of the membranes on a paper towel. Membranes are placed on Saran Wrap that has been smoothed on benchtop to remove air bubbles. Enough ECL reagent is added to cover the membrane for 1 minute. Remove membranes and drain off excess ECL on paper towel. Place membranes in between two transparency sheets, being careful to smooth out air bubbles.

### Quantitation:

[0435] Expose membranes using Fluor S-Max. Relative percent inhibition may be determined by comparing the intensity of each band with RNAi treatment to the intensity of each band without RNAi treatment (control). Normalize lanes by dividing band of interest by normalizing band for each lane. Divide the normalized value for each treated sample by the normalized value of the control. Percent inhibition can then be calculated by using the formula (1−above value)×100.

[0436] The skilled artisan would acknowledge that modifications to the above protocol may be required for each protein tyrosine kinase biomarker polypeptide of the present invention.

[0437] The contents of all patents, patent applications, published PCT applications and articles, books, references, reference manuals, abstracts, the Sequence Listing, and internet websites cited herein are hereby incorporated by reference in their entirety to more fully describe the state of the art to which the invention pertains.

[0438] As various changes can be made in the above-described subject matter without departing from the scope and spirit of the present invention, it is intended that all subject matter contained in the above description, or defined in the appended claims, be interpreted as descriptive and illustrative of the present invention. Many modifications and variations of the present invention are possible in light of the above teachings.

### Brief Description of the Sequence Listing

[0439] Incorporated herein by reference in its entirety is a Sequence Listing, comprising SEQ ID NO:1 through SEQ ID NO:912, which include nucleic acid and amino acid sequences of the protein tyrosine kinase biomarkers as presented in Table 2 herein and the nucleotide sequences of forward and reverse primer pairs for the polynucleotide markers, probes, and RNAi reagents as described herein. The Sequence Listing is contained on a compact disc, i.e., CD-ROM, three identical copies of which are filed herewith. The Sequence Listing, in IBM/PC MS-WINDOWS text format, was first created on Feb. 1, 2007, and is 153 MB in size.

What is claimed is:

1. A predictor set comprising a plurality of polynucleotides whose expression pattern is predictive of the response of cells to treatment with N-(2-chloro-6-methylphenyl)-2-[[6-[4-(2-hydroxyethyl)-1-piperazinyl]-2-methyl-4-pyrimidinyl]amino]-5-thiazolecarboxamide.

2. The predictor set according to claim 1 wherein the polynucleotides are selected from the group consisting of:
a) the polynucleotides provided in Table 2;
b) the sensitive predictor polynucleotides provided in Table 2;
c) the resistant predictor polynucleotides provided in Table 2
d) the polynucleotides provided in Table 3;
e) the sensitive predictor polynucleotides provided in Table 3;
f) the resistant predictor polynucleotides provided in Table 3;
g) the polynucleotides provided in Table 4;
h) the sensitive predictor polynucleotides provided in Table 4;
i) the resistant predictor polynucleotides provided in Table 4;
j) the polynucleotides provided in Table 5;
k) the sensitive predictor polynucleotides provided in Table 5;
l) the resistant predictor polynucleotides provided in Table 5;
m) CK5, PSA, AR polynucleotides;
n) PSA and AR polynucleotides;
o) CK5 polynucleotides;
p) uPA polynucleotides;
q) EPHA2 polynucleotides;
r) PSA polynucleotides;
s) AR polynucleotides; and
t) any combination of the above polynucleotides.

3. A predictor set comprising a plurality of polypeptides whose expression pattern is predictive of the response of cells to treatment with N-(2-chloro-6-methylphenyl)-2-[[6-[4-(2-hydroxyethyl)-1-piperazinyl]-2-methyl-4-pyrimidinyl]amino]-5-thiazolecarboxamide.

4. The predictor set according to claim 3 wherein the polypeptides are selected from the group consisting of:
a) the polypeptides provided in Table 2;
b) the sensitive predictor polypeptides provided in Table 2;
c) the resistant predictor polypeptides provided in Table 2
d) the polypeptides provided in Table 3;
e) the sensitive predictor polypeptides provided in Table 3;
f) the resistant predictor polypeptides provided in Table 3;
g) the polypeptides provided in Table 4;
h) the sensitive predictor polypeptides provided in Table 4;
i) the resistant predictor polypeptides provided in Table 4;
j) the polypeptides provided in Table 5;
k) the sensitive predictor polypeptides provided in Table 5;
l) the resistant predictor polypeptides provided in Table 5;
m) CK5, PSA, AR polypeptides;
n) PSA and AR polypeptides;
o) CK5 polypeptides;
p) uPA polypeptides;
q) EPHA2 polypeptides;
r) PSA polypeptides;
s) AR polypeptides; and
t) any combination of the above polypeptides.

5. A method for predicting whether a compound is capable of modulating the activity of cells, comprising the steps of:
a) obtaining a sample of cells;
b) determining whether said cells express a plurality of markers; and
c) correlating the expression of said markers to the compounds ability to modulate the activity of said cells.

6. The method according to claim 5 wherein the plurality of markers are one or more of the polynucleotides according to claim 2.

7. The method according to claim 9 wherein the plurality of markers are one or more of the polypeptides according to claim 5.

8. A method of identifying polynucleotides and polypeptides that predict compound sensitivity or resistance of cells associated with a disease state, comprising the steps of:
a) subjecting the plurality of cell lines to one or more compounds;
b) analyzing the expression pattern of a microarray of polynucleotides or polypeptides; and
c) selecting polynucleotides or polypeptides that predict the sensitivity or resistance of cells associated with a disease state by using said expression pattern of said microarray.

9. A method for predicting whether an individual requiring treatment for a disease state, will successfully respond or will not respond to said treatment comprising the steps of:
a) obtaining a sample of cells from said individual;
b) determining whether said cells express a plurality of markers; and
c) correlating the expression of said markers to the individuals ability to respond to said treatment.

10. The method according to claim 9 wherein the disease state is prostate cancer, breast cancer, or lung cancer.

11. A method of screening for candidate compounds capable of binding to and/or modulating the activity of a protein tyrosine kinase biomarker polypeptide, comprising:
a. acting a test compound with a polypeptide according to claim 4; and
b) selecting as candidate compounds those test compounds that bind to and/or modulate activity of the polypeptide.

12. A method of treating prostate cancer in a subject, comprising administering a modulator of one or more protein tyrosine kinase biomarker polypeptides as provided in claim 4.

13. A method of predicting whether patients may be responsive to a protein tyrosine kinase inhibitor, such as N-(2-chloro-6-methylphenyl)-2-[[6-[4-(2-hydroxyethyl)-1-piperazinyl]-2-methyl-4-pyrimidinyl]amino]-5-thiazolecarboxamide, using a method selected from the group consisting of:
a) measuring the expression level of kallikrein 3 and androgen receptor in a patient sample, wherein an elevated expression level of kallikrein 3 and/or androgen receptor relative to the level observed in a standard sample, is indicative of at least partial resistance to said protein tyrosine kinase inhibitor, and wherein decreased expression of kallikrein 3 and/or androgen receptor relative to the level observed in a standard sample, is indicative of sensitivity to said protein tyrosine kinase inhibitor;
b) measuring the expression level of cytokeratin 5 in a patient sample, wherein a decreased expression level of cytokeratin 5 relative to the level observed in a standard sample, is indicative of at least partial resistance to said protein tyrosine kinase inhibitor, and wherein elevated expression of cytokeratin 5 relative to the level observed in a standard sample, is indicative of sensitivity to said protein tyrosine kinase inhibitor;
c) determining whether a patient sample shows signs of basal cell type phenotype for the prostatic cell lineage, wherein the presence of such signs is indicative of sensitivity to said protein tyrosine kinase inhibitor;
d) measuring the expression level of kallikrein 3, androgen receptor, and cytokeratin 5 in a patient sample, wherein an elevated expression level of kallikrein 3 and/or androgen receptor relative to the level observed in a standard sample and wherein a decreased expression level relative to the level observed in a standard sample, is indicative of at least partial resistance to said protein tyrosine kinase inhibitor, and wherein decreased expression of kallikrein 3 and/or androgen receptor relative to the level observed in a standard sample and wherein an elevated expression level of cytokeratin 5 relative to the level observed in a standard sample, is indicative of sensitivity to said protein tyrosine kinase inhibitor;
e) measuring the expression level of SCEL, ANXA3, CST6, LAMC2, ZBED2, EREG, AXL, FHL2, PLAU, and/or ARNTL2 in a patient sample, wherein a decreased expression level of SCEL, ANXA3, CST6, LAMC2, ZBED2, EREG, AXL, FHL2, PLAU, and/or ARNTL2 relative to the level observed in a standard sample, is indicative of at least partial resistance to said protein tyrosine kinase inhibitor, and wherein elevated expression of SCEL, ANXA3, CST6, LAMC2, ZBED2, EREG, AXL, FHL2, PLAU, and/or ARNTL2 relative to the level observed in a standard sample, is indicative of sensitivity to said protein tyrosine kinase inhibitor;
f) measuring the expression level of EPHA2 in a patient sample, wherein a decreased expression level of EPHA2 relative to the level observed in a standard sample, is indicative of at least partial resistance to said protein tyrosine kinase inhibitor, and wherein elevated expression of EPHA2 relative to the level observed in a standard sample, is indicative of sensitivity to said protein tyrosine kinase inhibitor; and
g) measuring the expression level of UPA in a patient sample, wherein a decreased expression level of UPA relative to the level observed in a standard sample, is indicative of at least partial resistance to said protein tyrosine kinase inhibitor, and wherein elevated expression of UPA relative to the level observed in a standard sample, is indicative of sensitivity to said protein tyrosine kinase inhibitor.

14. A method of establishing a treatment regimen for a patient suffering from cancer comprising the step of determining whether a patient is predicted to be responsive to a protein tyrosine kinase inhibitor, such as N-(2-chloro-6-methylphenyl)-2-[[6-[4-(2-hydroxyethyl)-1-piperazinyl]-2-methyl-4-pyrimidinyl]amino]-5-thiazolecarboxamide according to any one of claim 5, 6, 7, 8, 9, 10, 11, 12, or 13, and administering a more aggressive treatment regimen if the patient sample is predicted to be resistant to said protein tyrosine kinase inhibitor, or administering a typical treatment regimen if the patient sample is predicted to be sensitive to said protein tyrosine kinase inhibitor.

15. A method of using a surrogate marker to predict the responsiveness of a patient suffering from cancer to a protein tyrosine kinase inhibitor, comprising the step of comparing the expression level of a predictive polynucleotide or polypeptide marker both prior to and subsequent to the administration of a protein tyrosine kinase inhibitor, such as N-(2-chloro-6-methylphenyl)-2-[[6-[4-(2-hydroxyethyl)-1-piperazinyl]-2-methyl-4-pyrimidinyl]amino]-5-thiazolecarboxamide, wherein a decrease in expression of said predictive marker subsequent to said administration relative to the absence of said administration is indicative of said patient being responsive to said protein tyrosine kinase inhibitor, wherein said predictive marker is represented by one or more sensitive markers provided in Tables 2, 3, 4, or 5.

The application's sequence listing, which the Patent Office published only in electronic form, follows.

SEQUENCE LISTING (912 sequences)

SEQ ID NO: 1 - DNA, 2320 bp, Homo sapiens
tcgacagctctctcgcccagcccagttctggaagggataaaaagggggcatcaccgttcctgggtaacagagccaccttctgcgtcctgctgagctctgttctctccagcacctcccaacccactagtgcctggttctcttgctccaccaggaacaagccaccatgtctcgccagtcaagtgtgtccttccggagcgggggcagtcgtagcttcagcaccgcctctgccatcaccccgtctgtctcccgcaccagcttcacctccgtgtcccggtccgggggtggcggtggtggtggcttcggcagggtcagccttgcgggtgcttgtggagtgggtggctatggcagccggagcctctacaacctggggggctccaagaggatatccatcagcactagtggtggcagcttcaggaaccggtttggtgctggtgctggaggcggctatggctttggaggtggtgccggtagtggatttggtttcggcggtggagctggtggtggctttgggctcggtggcggagctggctttggaggtggcttcggtggccctggctttcctgtctgccctcctggaggtatccaagaggtcactgtcaaccagagtctcctgactcccctcaacctgcaaatcgaccccagcatccagagggtgaggaccgaggagcgcgagcagatcaagaccctcaacaataagtttgcctccttcatcgacaaggtgcggttcctggagcagcagaacaaggttctggacaccaagtggaccctgctgcaggagcagggcaccaagactgtgaggcagaacctggagccgttgttcgagcagtacatcaacaacctcaggaggcagctggacagcatcgtgggggaacggggccgcctggactcagagctgagaaacatgcaggacctggtggaagacttcaagaacaagtatgaggatgaaatcaacaagcgtaccactgctgagaatgagtttgtgatgctgaagaaggatgtagatgctgcctacatgaacaaggtggagctggaggccaaggttgatgcactgatggatgagattaacttcatgaagatgttctttgatgcggagctgtcccagatgcagacgcatgtctctgacacctcagtggtcctctccatggacaacaaccgcaacctggacctggatagcatcatcgctgaggtcaaggcccagtatgaggagattgccaaccgcagccggacagaagccgagtcctggtatcagaccaagtatgaggagctgcagcagacagctggccggcatggcgatgacctccgcaacaccaagcatgagatctctgagatgaaccggatgatccagaggctgagagccgagattgacaatgtcaagaaacagtgcgccaatctgcagaacgccattgcggatgccgagcagcgtggggagctggccctcaaggatgccaggaacaagctggccgagctggaggaggccctgcagaaggccaagcaggacatggcccggctgctgcgtgagtaccaggagctcatgaacaccaagctggccctggacgtggagatcgccacttaccgcaagctgctggagggcgaggaatgcagactcagtggagaaggagttggaccagtcaacatctctgttgtcacaagcagtgtttcctctggatatggcagtggcagtggctatggcggtggcctcggtggaggtcttggcggcggcctcggtggaggtcttgccggaggtagcagtggaagctactactccagcagcagtgggggtgtcggcctaggtggtgggctcagtgtggggggctctggcttcagtgcaagcagtggccgagggctgggggtgggctttggcagtggcgggggtagcagctccagcgtcaaatttgtctccaccacctcctcctcccggaagagcttcaagagctaagaacctgctgcaagtcactgccttccaagtgcagcaacccagcccatggagattgcctcttctaggcagttgctcaagccatgttttatccttttctggagagtagtctagaccaagccaattgcagaaccacattctttggttcccaggagagccccattcccagcccctggtctcccgtgccgcagttctatattctgcttcaaatcagccttcaggtttcccacagcatggcccctgctgacacgagaacccaaagttttcccaaatctaaatcatcaaaacagaatccccaccccaatcccaaattttgttttggttctaactacctccagaatgtgttcaataaaatgcttttataatataaaaaaaaaaaaaaaaaaa

SEQ ID NO: 2 - protein, 590 aa, Homo sapiens
MSRQSSVSFRSGGSRSFSTASAITPSVSRTSFTSVSRSGGGGGGGFGRVSLAGACGVGGYGSRSLYNLGGSKRISISTSGGSFRNRFGAGAGGGYGFGGGAGSGFGFGGGAGGGFGLGGGAGFGGGFGGPGFPVCPPGGIQEVTVNQSLLTPLNLQIDPSIQRVRTEEREQIKTLNNKFASFIDKVRFLEQQNKVLDTKWTLLQEQGTKTVRQNLEPLFEQYINNLRRQLDSIVGERGRLDSELRNMQDLVEDFKNKYEDEINKRTTAENEFVMLKKDVDAAYMNKVELEAKVDALMDEINFMKMFFDAELSQMQTHVSDTSVVLSMDNNRNLDLDSIIAEVKAQYEEIANRSRTEAESWYQTKYEELQQTAGRHGDDLRNTKHEISEMNRMIQRLRAEIDNVKKQCANLQNAIADAEQRGELALKDARNKLAELEEALQKAKQDMARLLREYQELMNTKLALDVEIATYRKLLEGEECRLSGEGVGPVNISVVTSSVSSGYGSGSGYGGGLGGGLGGGLGGGLAGGSSGSYYSSSSGGVGLGGGLSVGGSGFSASSGRGLGVGFGSGGGSSSSVKFVSTTSSSRKSFKS

SEQ ID NO: 3 - DNA, 2360 bp, Homo sapiens
acagtgcggagaccgcagccccggagcccgggccagggtccacctgtccccgcagcgccggctcgcgccctcctgccgcagccaccgagccgccgtctagcgccccgacctcgccaccatgagagccctgctggcgcgcctgcttctctgcgtcctggtcgtgagcgactccaaaggcagcaatgaacttcatcaagttccatcgaactgtgactgtctaaatggaggaacatgtgtgtccaacaagtacttctccaacattcactggtgcaactgcccaaagaaattcggagggcagcactgtgaaatagataagtcaaaaacctgctatgaggggaatggtcacttttaccgaggaaaggccagcactgacaccatgggccggccctgcctgccctggaactctgccactgtccttcagcaaacgtaccatgcccacagatctgatgctcttcagctgggcctggggaaacataattactgcaggaacccagacaaccggaggcgaccctggtgctatgtgcaggtgggcctaaagccgcttgtccaagagtgcatggtgcatgactgcgcagatggaaaaaagccctcctctcctccagaagaattaaaatttcagtgtggccaaaagactctgaggccccgctttaagattattgggggagaattcaccaccatcgagaaccagccctggtttgcggccatctacaggaggcaccgggggggctctgtcacctacgtgtgtggaggcagcctcatcagcccttgctgggtgatcagcgccacacactgcttcattgattacccaaagaaggaggactacatcgtctacctgggtcgctcaaggcttaactccaacacgcaaggggagatgaagtttgaggtggaaaacctcatcctacacaaggactacagcgctgacacgcttgctcaccacaacgacattgccttgctgaagatccgttccaaggagggcaggtgtgcgcagccatcccggactatacagaccatctgcctgccctcgatgtataacgatccccagtttggcacaagctgtgagatcactggctttggaaaagagaattctaccgactatctctatccggagcagctgaaaatgactgttgtgaagctgatttcccaccgggagtgtcagcagccccactactacggctctgaagtcaccaccaaaatgctgtgtgctgctgacccacagtggaaaacagattcctgccagggagactcagggggacccctcgtctgttccctccaaggccgcatgactttgactggaattgtgagctggggccgtggatgtgccctgaaggacaagccaggcgtctacacgagagtctcacacttcttaccctggatccgcagtcacaccaaggaagagaatggcctggccctctgagggtccccagggaggaaacgggcaccacccgctttcttgctggttgtcatttttgcagtagagtcatctccatcagctgtaagaagagactgggaagataggctctgcacagatggatttgcctgtgccacccaccagggcgaacgacaatagctttaccctcaggcataggcctgggtgctggctgcccagacccctctggccaggatggaggggtggtcctgactcaacatgttactgaccagcaacttgtctttttctggactgaagcctgcaggagttaaaaagggcagggcatctcctgtgcatgggtgaagggagagccagctcccccgacggtgggcatttgtgaggcccatggttgagaaatgaataatttcccaattaggaagtgtaacagctgaggtctcttgagggagcttagccaatgtgggagcagcggtttggggagcagagacactaacgacttcagggcagggctctgatattccatgaatgtatcaggaaatatatatgtgtgtgtatgtttgcacacttgtgtgtgggctgtgagtgtaagtgtgagtaagagctggtgtctgattgttaagtctaaatatttccttaaactgtgtggactgtgatgccacacagagtggtctttctggagaggttataggtcactcctggggcctcttgggtcccccacgtgacagtgcctgggaatgtattattctgcagcatgacctgtgaccagcactgtctcagtttcactttcacatagatgtccctttcttggccagttatcccttccttttagcctagttcatccaatcctcactgggtggggtgaggaccactcctgtacactgaatatttatatttcactatttttatttatatttttgtaattttaaataaaagtgatcaataaaatgtgatttttctgatgaaaaaaaaaaaaaaa

SEQ ID NO: 4 - protein, 431 aa, Homo sapiens
MRALLARLLLCVLVVSDSKGSNELHQVPSNCDCLNGGTCVSNKYFSNIHWCNCPKKFGGQHCEIDKSKTCYEGNGHFYRGKASTDTMGRPCLPWNSATVLQQTYHAHRSDALQLGLGKHNYCRNPDNRRRPWCYVQVGLKPLVQECMVHDCADGKKPSSPPEELKFQCGQKTLRPRFKIIGGEFTTIENQPWFAAIYRRHRGGSVTYVCGGSLISPCWVISATHCFIDYPKKEDYIVYLGRSRLNSNTQGEMKFEVENLILHKDYSADTLAHHNDIALLKIRSKEGRCAQPSRTIQTICLPSMYNDPQFGTSCEITGFGKENSTDYLYPEQLKMTVVKLISHRECQQPHYYGSEVTTKMLCAADPQWKTDSCQGDSGGPLVCSLQGRMTLTGIVSWGRGCALKDKPGVYTRVSHFLPWIRSHTKEENGLAL

SEQ ID NO: 5 - DNA, 4314 bp, Homo sapiens
cgagatcccggggagccagcttgctgggagagcgggacggtccggagcaagcccagaggcagaggaggcgacagagggaaaaagggccgagctagccgctccagtgctgtacaggagccgaagggacgcaccacgccagccccagcccggctccagcgacagccaacgcctcttgcagcgcggcggcttcgaagccgccgcccggagctgccctttcctcttcggtgaagtttttaaaagctgctaaagactcggaggaagcaaggaaagtgcctggtaggactgacggctgcctttgtcctcctcctctccaccccgcctccccccaccctgccttccccccctcccccgtcttctctcccgcagctgcctcagtcggctactctcagccaacccccctcaccacccttctccccacccgcccccccgcccccgtcggcccagcgctgccagcccgagtttgcagagaggtaactccctttggctgcgagcgggcgagctagctgcacattgcaaagaaggctcttaggagccaggcgactggggagcggcttcagcactgcagccacgacccgcctggttaggctgcacgcggagagaaccctctgttttcccccactctctctccacctcctcctgccttccccaccccgagtgcggagccagagatcaaaagatgaaaaggcagtcaggtcttcagtagccaaaaaacaaaacaaacaaaaacaaaaaagccgaaataaaagaaaaagataataactcagttcttatttgcacctacttcagtggacactgaatttggaaggtggaggattttgtttttttcttttaagatctgggcatcttttgaatctacccttcaagtattaagagacagactgtgagcctagcagggcagatcttgtccaccgtgtgtcttcttctgcacgagactttgaggctgtcagagcgctttttgcgtggttgctcccgcaagtttccttctctggagcttcccgcaggtgggcagctagctgcagcgactaccgcatcatcacagcctgttgaactcttctgagcaagagaaggggaggcggggtaagggaagtaggtggaagattcagccaagctcaaggatggaagtgcagttagggctgggaagggtctaccctcggccgccgtccaagacctaccgaggagctttccagaatctgttccagagcgtgcgcgaagtgatccagaacccgggccccaggcacccagaggccgcgagcgcagcacctcccggcgccagtttgctgctgctgcagcagcagcagcagcagcagcagcagcagcagcagcagcagcagcagcagcagcagcagcagcagcaagagactagccccaggcagcagcagcagcagcagggtgaggatggttctccccaagcccatcgtagaggccccacaggctacctggtcctggatgaggaacagcaaccttcacagccgcagtcggccctggagtgccaccccgagagaggttgcgtcccagagcctggagccgccgtggccgccagcaaggggctgccgcagcagctgccagcacctccggacgaggatgactcagctgccccatccacgttgtccctgctgggccccactttccccggcttaagcagctgctccgctgaccttaaagacatcctgagcgaggccagcaccatgcaactccttcagcaacagcagcaggaagcagtatccgaaggcagcagcagcgggagagcgagggaggcctcgggggctcccacttcctccaaggacaattacttagggggcacttcgaccatttctgacaacgccaaggagttgtgtaaggcagtgtcggtgtccatgggcctgggtgtggaggcgttggagcatctgagtccaggggaacagcttcggggggattgcatgtacgccccacttttgggagttccacccgctgtgcgtcccactccttgtgccccattggccgaatgcaaaggttctctgctagacgacagcgcaggcaagagcactgaagatactgctgagtattcccctttcaagggaggttacaccaaagggctagaaggcgagagcctaggctgctctggcagcgctgcagcagggagctccgggacacttgaactgccgtctaccctgtctctctacaagtccggagcactggacgaggcagctgcgtaccagagtcgcgactactacaactttccactggctctggccggaccgccgccccctccgccgcctccccatccccacgctcgcatcaagctggagaacccgctggactacggcagcgcctgggcggctgcggcggcgcagtgccgctatggggacctggcgagcctgcatggcgcgggtgcagcgggacccggttctgggtcaccctcagccgccgcttcctcatcctggcacactctcttcacagccgaagaaggccagttgtatggaccgtgtggtggtggtgggggtggtggcggcggcggcggcggcggcggcggcggcggcggcggcggcggcggcggcgaggcgggagctgtagccccctacggctacactcggccccctcaggggctggcgggccaggaaagcgacttcaccgcacctgatgtgtggtaccctggcggcatggtgagcagagtgccctatcccagtcccacttgtgtcaaaagcgaaatgggcccctggatggatagctactccggaccttacggggacatgcgtttggagactgccagggaccatgttttgcccattgactattactttccaccccagaagacctgcctgatctgtggagatgaagcttctgggtgtcactatggagctctcacatgtggaagctgcaaggtcttcttcaaaagagccgctgaagggaaacagaagtacctgtgcgccagcagaaatgattgcactattgataaattccgaaggaaaaattgtccatcttgtcgtcttcggaaatgttatgaagcagggatgactctgggagcccggaagctgaagaaacttggtaatctgaaactacaggaggaaggagaggcttccagcaccaccagccccactgaggagacaacccagaagctgacagtgtcacacattgaaggctatgaatgtcagcccatctttctgaatgtcctggaagccattgagccaggtgtagtgtgtgctggacacgacaacaaccagcccgactcctttgcagccttgctctctagcctcaatgaactgggagagagacagcttgtacacgtggtcaagtgggccaaggccttgcctggcttccgcaacttacacgtggacgaccagatggctgtcattcagtactcctggatggggctcatggtgtttgccatgggctggcgatccttcaccaatgtcaactccaggatgctctacttcgcccctgatctggttttcaatgagtaccgcatgcacaagtcccggatgtacagccagtgtgtccgaatgaggcacctctctcaagagtttggatggctccaaatcaccccccaggaattcctgtgcatgaaagcactgctactcttcagcattattccagtggatgggctgaaaaatcaaaaattctttgatgaacttcgaatgaactacatcaaggaactcgatcgtatcattgcatgcaaaagaaaaaatcccacatcctgctcaagacgcttctaccagctcaccaagctcctggactccgtgcagcctattgcgagagagctgcatcagttcacttttgacctgctaatcaagtcacacatggtgagcgtggactttccggaaatgatggcagagatcatctctgtgcaagtgcccaagatcctttctgggaaagtcaagcccatctatttccacacccagtgaagcattggaaaccctatttccccaccccagctcatgccccctttcagatgtcttctgcctgttataactctgcactactcctctgcagtgccttggggaatttcctctattgatgtacagtctgtcatgaacatgttcctgaattctatttgctgggctttttttttctctttctctcctttctttttcttcttccctccctatctaaccctcccatggcaccttcagactttgcttcccattgtggctcctatctgtgttttgaatggtgttgtatgcctttaaatctgtgatgatcctcatatggcccagtgtcaagttgtgcttgtttacagcactactctgtgccagccacacaaacgtttacttatcttatgccacgggaagtttagagagctaagattatctggggaaatcaaaacaaaaacaagcaaac

SEQ ID NO: 6 - protein, 920 aa, Homo sapiens
MEVQLGLGRVYPRPPSKTYRGAFQNLFQSVREVIQNPGPRHPEAASAAPPGASLLLLQQQQQQQQQQQQQQQQQQQQQQQETSPRQQQQQQGEDGSPQAHRRGPTGYLVLDEEQQPSQPQSALECHPERGCVPEPGAAVAASKGLPQQLPAPPDEDDSAAPSTLSLLGPTFPGLSSCSADLKDILSEASTMQLLQQQQQEAVSEGSSSGRAREASGAPTSSKDNYLGGTSTISDNAKELCKAVSVSMGLGVEALEHLSPGEQLRGDCMYAPLLGVPPAVRPTPCAPLAECKGSLLDDSAGKSTEDTAEYSPFKGGYTKGLEGESLGCSGSAAAGSSGTLELPSTLSLYKSGALDEAAAYQSRDYYNFPLALAGPPPPPPPPHPHARIKLENPLDYGSAWAAAAAQCRYGDLASLHGAGAAGPGSGSPSAAASSSWHTLFTAEEGQLYGPCGGGGGGGGGGGGGGGGGGGGGGGEAGAVAPYGYTRPPQGLAGQESDFTAPDVWYPGGMVSRVPYPSPTCVKSEMGPWMDSYSGPYGDMRLETARDHVLPIDYYFPPQKTCLICGDEASGCHYGALTCGSCKVFFKRAAEGKQKYLCASRNDCTIDKFRRKNCPSCRLRKCYEAGMTLGARKLKKLGNLKLQEEGEASSTTSPTEETTQKLTVSHIEGYECQPIFLNVLEAIEPGVVCAGHDNNQPDSFAALLSSLNELGERQLVHVVKWAKALPGFRNLHVDDQMAVIQYSWMGLMVFAMGWRSFTNVNSRMLYFAPDLVFNEYRMHKSRMYSQCVRMRHLSQEFGWLQITPQEFLCMKALLLFSIIPVDGLKNQKFFDELRMNYIKELDRIIACKRKNPTSCSRRFYQLTKLLDSVQPIARELHQFTFDLLIKSHMVSVDFPEMMAEIISVQVPKILSGKVKPIYFHTQ

SEQ ID NO: 7 - DNA, 1906 bp, Homo sapiens
agccccaagcttaccacctgcacccggagagctgtgtcaccatgtgggtcccggttgtcttcctcaccctgtccgtgacgtggattggtgctgcacccctcatcctgtctcggattgtgggaggctgggagtgcgagaagcattcccaaccctggcaggtgcttgtggcctctcgtggcagggcagtctgcggcggtgttctggtgcacccccagtgggtcctcacagctgcccactgcatcaggaacaaaagcgtgatcttgctgggtcggcacagcctgtttcatcctgaagacacaggccaggtatttcaggtcagccacagcttcccacacccgctctacgatatgagcctcctgaagaatcgattcctcaggccaggtgatgactccagccacgacctcatgctgctccgcctgtcagagcctgccgagctcacggatgctgtgaaggtcatggacctgcccacccaggagccagcactggggaccacctgctacgcctcaggctggggcagcattgaaccagaggagttcttgaccccaaagaaacttcagtgtgtggacctccatgttatttccaatgacgtgtgtgcgcaagttcaccctcagaaggtgaccaagttcatgctgtgtgctggacgctggacagggggcaaaagcacctgctcgtgggtcattctgatcaccgaactgaccatgccagccctgccgatggtcctccatggctccctagtgccctggagaggaggtgtctagtcagagagtagtcctggaaggtggcctctgtgaggagccacggggacagcatcctgcagatggtcctggcccttgtcccaccgacctgtctacaaggactgtcctcgtggaccctcccctctgcacaggagctggaccctgaagtcccttccccaccggccaggactggagcccctacccctctgttggaatccctgcccaccttcttctggaagtcggctctggagacatttctctcttcttccaaagctgggaactgctatctgttatctgcctgtccaggtctgaaagataggattgcccaggcagaaactgggactgacctatctcactctctccctgcttttacccttagggtgattctgggggcccacttgtctgtaatggtgtgcttcaaggtatcacgtcatggggcagtgaaccatgtgccctgcccgaaaggccttccctgtacaccaaggtggtgcattaccggaagtggatcaaggacaccatcgtggccaacccctgagcacccctatcaaccccctattgtagtaaacttggaaccttggaaatgaccaggccaagactcaagcctccccagttctactgacctttgtccttaggtgtgaggtccagggttgctaggaaaagaaatcagcagacacaggtgtagaccagagtgtttcttaaatggtgtaattttgtcctctctgtgtcctggggaatactggccatgcctggagacatatcactcaatttctctgaggacacagataggatggggtgtctgtgttatttgtggggtacagagatgaaagaggggtgggatccacactgagagagtggagagtgacatgtgctggacactgtccatgaagcactgagcagaagctggaggcacaacgcaccagacactcacagcaaggatggagctgaaaacataacccactctgtcctggaggcactgggaagcctagagaaggctgtgagccaaggagggagggtcttcctttggcatgggatggggatgaagtaaggagagggactggaccccctggaagctgattcactatggggggaggtgtattgaagtcctccagacaaccctcagatttgatgatttcctagtagaactcacagaaataaagagctgttatactgtg

SEQ ID NO: 8 - protein, 238 aa, Homo sapiens
MWVPVVFLTLSVTWIGAAPLILSRIVGGWECEKHSQPWQVLVASRGRAVCGGVLVHPQWVLTAAHCIRNKSVILLGRHSLFHPEDTGQVFQVSHSFPHPLYDMSLLKNRFLRPGDDSSHDLMLLRLSEPAELTDAVKVMDLPTQEPALGTTCYASGWGSIEPEEFLTPKKLQCVDLHVISNDVCAQVHPQKVTKFMLCAGRWTGGKSTCSWVILITELTMPALPMVLHGSLVPWRGGV

SEQ ID NO: 9 - DNA, 3963 bp, Homo sapiens
attaaggactcggggcaggaggggcagaagttgcgcgcaggccggcgggcgggagcggacaccgaggccggcgtgcaggcgtgcgggtgtgcgggagccgggctcggggggatcggaccgagagcgagaagcgcggcatggagctccaggcagcccgcgcctgcttcgccctgctgtggggctgtgcgctggccgcggccgcggcggcgcagggcaaggaagtggtactgctggactttgctgcagctggaggggagctcggctggctcacacacccgtatggcaaagggtgggacctgatgcagaacatcatgaatgacatgccgatctacatgtactccgtgtgcaacgtgatgtctggcgaccaggacaactggctccgcaccaactgggtgtaccgaggagaggctgagcgtatcttcattgagctcaagtttactgtacgtgactgcaacagcttccctggtggcgccagctcctgcaaggagactttcaacctctactatgccgagtcggacctggactacggcaccaacttccagaagcgcctgttcaccaagattgacaccattgcgcccgatgagatcaccgtcagcagcgacttcgaggcacgccacgtgaagctgaacgtggaggagcgctccgtggggccgctcacccgcaaaggcttctacctggccttccaggatatcggtgcctgtgtggcgctgctctccgtccgtgtctactacaagaagtgccccgagctgctgcagggcctggcccacttccctgagaccatcgccggctctgatgcaccttccctggccactgtggccggcacctgtgtggaccatgccgtggtgccaccggggggtgaagagccccgtatgcactgtgcagtggatggcgagtggctggtgcccattgggcagtgcctgtgccaggcaggctacgagaaggtggaggatgcctgccaggcctgctcgcctggattttttaagtttgaggcatctgagagcccctgcttggagtgccctgagcacacgctgccatcccctgagggtgccacctcctgcgagtgtgaggaaggcttcttccgggcacctcaggacccagcgtcgatgccttgcacacgacccccctccgccccacactacctcacagccgtgggcatgggtgccaaggtggagctgcgctggacgccccctcaggacagcgggggccgcgaggacattgtctacagcgtcacctgcgaacagtgctggcccgagtctggggaatgcgggccgtgtgaggccagtgtgcgctactcggagcctcctcacggactgacccgcaccagtgtgacagtgagcgacctggagccccacatgaactacaccttcaccgtggaggcccgcaatggcgtctcaggcctggtaaccagccgcagcttccgtactgccagtgtcagcatcaaccagacagagccccccaaggtgaggctggagggccgcagcaccacctcgcttagcgtctcctggagcatccccccgccgcagcagagccgagtgtggaagtacgaggtcacttaccgcaagaagggagactccaacagctacaatgtgcgccgcaccgagggtttctccgtgaccctggacgacctggccccagacaccacctacctggtccaggtgcaggcactgacgcaggagggccagggggccggcagcaaggtgcacgaattccagacgctgtccccggagggatctggcaacttggcggtgattggcggcgtggctgtcggtgtggtcctgcttctggtgctggcaggagttggcttctttatccaccgcaggaggaagaaccagcgtgcccgccagtccccggaggacgtttacttctccaagtcagaacaactgaagcccctgaagacatacgtggacccccacacatatgaggaccccaaccaggctgtgttgaagttcactaccgagatccatccatcctgtgtcactcggcagaaggtgatcggagcaggagagtttggggaggtgtacaagggcatgctgaagacatcctcggggaagaaggaggtgccggtggccatcaagacgctgaaagccggctacacagagaagcagcgagtggacttcctcggcgaggccggcatcatgggccagttcagccaccacaacatcatccgcctagagggcgtcatctccaaatacaagcccatgatgatcatcactgagtacatggagaatggggccctggacaagttccttcgggagaaggatggcgagttcagcgtgctgcagctggtgggcatgctgcggggcatcgcagctggcatgaagtacctggccaacatgaactatgtgcaccgtgacctggctgcccgcaacatcctcgtcaacagcaacctggtctgcaaggtgtctgactttggcctgtcccgcgtgctggaggacgaccccgaggccacctacaccaccagtggcggcaagatccccatccgctggaccgccccggaggccatttcctaccggaagttcacctctgccagcgacgtgtggagctttggcattgtcatgtgggaggtgatgacctatggcgagcggccctactgggagttgtccaaccacgaggtgatgaaagccatcaatgatggcttccggctccccacacccatggactgcccctccgccatctaccagctcatgatgcagtgctggcagcaggagcgtgcccgccgccccaagttcgctgacatcgtcagcatcctggacaagctcattcgtgcccctgactccctcaagaccctggctgactttgacccccgcgtgtctatccggctccccagcacgagcggctcggagggggtgcccttccgcacggtgtccgagtggctggagtccatcaagatgcagcagtatacggagcacttcatggcggccggctacactgccatcgagaaggtggtgcagatgaccaacgacgacatcaagaggattggggtgcggctgcccggccaccagaagcgcatcgcctacagcctgctgggactcaaggaccaggtgaacactgtggggatccccatctgagcctcgacagggcctggagccccatcggccaagaatacttgaagaaacagagtggcctccctgctgtgccatgctgggccactggggactttatttatttctagttctttcctccccctgcaacttccgctgaggggtctcggatgacaccctggcctgaactgaggagatgaccagggatgctgggctgggccctctttccctgcgagacgcacacagctgagcacttagcaggcaccgccacgtcccagcatccctggagcaggagccccgccacagccttcggacagacatataggatattcccaagccgaccttccctccgccttctcccacatgaggccatctcaggagatggagggcttggcccagcgccaagtaaacagggtacctcaagccccatttcctcacactaagagggcagactgtgaacttgactgggtgagacccaaagcggtccctgtccctctagtgccttctttagaccctcgggccccatcctcatccctgactggccaaacccttgctttcctgggcctttgcaagatgcttggttgtgttgaggtttttaaatatatattttgtactttgtggagagaatgtgtgtgtgtggcagggggccccgccagggctggggacagagggtgtcaaacattcgtgagctggggactcagggaccggtgctgcaggagtgtcctgcccatgccccagtcggccccatctctcatccttttggataagtttctattctgtcagtgttaaagattttgttttgttggacatttttttcgaatcttaatttattattttttttatatttattgttagaaaatgacttatttctgctctggaataaagttgcagatgattcaaaccgaaaaaaaaaaaaaaaaaa

SEQ ID NO: 10 - protein, 976 aa, Homo sapiens
MELQAARACFALLWGCALAAAAAAQGKEVVLLDFAAAGGELGWLTHPYGKGWDLMQNIMNDMPIYMYSVCNVMSGDQDNWLRTNWVYRGEAERIFIELKFTVRDCNSFPGGASSCKETFNLYYAESDLDYGTNFQKRLFTKIDTIAPDEITVSSDFEARHVKLNVEERSVGPLTRKGFYLAFQDIGACVALLSVRVYYKKCPELLQGLAHFPETIAGSDAPSLATVAGTCVDHAVVPPGGEEPRMHCAVDGEWLVPIGQCLCQAGYEKVEDACQACSPGFFKFEASESPCLECPEHTLPSPEGATSCECEEGFFRAPQDPASMPCTRPPSAPHYLTAVGMGAKVELRWTPPQDSGGREDIVYSVTCEQCWPESGECGPCEASVRYSEPPHGLTRTSVTVSDLEPHMNYTFTVEARNGVSGLVTSRSFRTASVSINQTEPPKVRLEGRSTTSLSVSWSIPPPQQSRVWKYEVTYRKKGDSNSYNVRRTEGFSVTLDDLAPDTTYLVQVQALTQEGQGAGSKVHEFQTLSPEGSGNLAVIGGVAVGVVLLLVLAGVGFFIHRRRKNQRARQSPEDVYFSKSEQLKPLKTYVDPHTYEDPNQAVLKFTTEIHPSCVTRQKVIGAGEFGEVYKGMLKTSSGKKEVPVAIKTLKAGYTEKQRVDFLGEAGIMGQFSHHNIIRLEGVISKYKPMMIITEYMENGALDKFLREKDGEFSVLQLVGMLRGIAAGMKYLANMNYVHRDLAARNILVNSNLVCKVSDFGLSRVLEDDPEATYTTSGGKIPIRWTAPEAISYRKFTSASDVWSFGIVMWEVMTYGERPYWELSNHEVMKAINDGFRLPTPMDCPSAIYQLMMQCWQQERARRPKFADIVSILDKLIRAPDSLKTLADFDPRVSIRLPSTSGSEGVPFRTVSEWLESIKMQQYTEHFMAAGYTAIEKVVQMTNDDIKRIGVRLPGHQKRIAYSLLGLKDQVNTVGIPI

SEQ ID NO: 11 - DNA, 2558 bp, Homo sapiens
ttgtgctcctcgcttgcctgttccttttccacgcattttccaggataactgtgactccaggcccgcaatggatgccctgcaactagcaaattcggcttttgccgttgatctgttcaaacaactatgtgaaaaggagccactgggcaatgtcctcttctctccaatctgtctctccacctctctgtcacttgctcaagtgggtgctaaaggtgacactgcaaatgaaattggacaggttcttcattttgaaaatgtcaaagatataccctttggatttcaaacagtaacatcggatgtaaacaaacttagttccttttactcactgaaactaatcaagcggctctacgtagacaaatctctgaatctttctacagagttcatcagctctacgaagagaccctatgcaaaggaattggaaactgttgacttcaaagataaattggaagaaacgaaaggtcagatcaacaactcaattaaggatctcacagatggccactttgagaacattttagctgacaacagtgtgaacgaccagaccaaaatccttgtggttaatgctgcctactttgttggcaagtggatgaagaaatttcctgaatcagaaacaaaagaatgtcctttcagactcaacaagacagacaccaaaccagtgcagatgatgaacatggaggccacgttctgtatgggaaacattgacagtatcaattgtaagatcatagagcttccttttcaaaataagcatctcagcatgttcatcctactacccaaggatgtggaggatgagtccacaggcttggagaagattgaaaaacaactcaactcagagtcactgtcacagtggactaatcccagcaccatggccaatgccaaggtcaaactctccattccaaaatttaaggtggaaaagatgattgatcccaaggcttgtctggaaaatctagggctgaaacatatcttcagtgaagacacatctgatttctctggaatgtcagagaccaagggagtggccctatcaaatgttatccacaaagtgtgcttagaaataactgaagatggtggggattccatagaggtgccaggagcacggatcctgcagcacaaggatgaattgaatgctgaccatccctttatttacatcatcaggcacaacaaaactcgaaacatcattttctttggcaaattctgttctccttaagtggcatagcccatgttaagtcctccctgacttttctgtggatgccgatttctgtaaactctgcatccagagattcattttctagatacaataaattgctaatgttgctggatcaggaagccgccagtacttgtcatatgtagccttcacacagatagacctttttttttttccaattctatcttttgtttccttttttcccataagacaatgacatacgcttttaatgaaaaggaatcacgttagaggaaaaatatttattcattatttgtcaaattgtccggggtagttggcagaaatacagtcttccacaaagaaaattcctataaggaagatttggaagctcttcttcccagcactatgctttccttctttgggatagagaatgttccagacattctcgcttccctgaaagactgaagaaagtgtagtgcatgggacccacgaaactgccctggctccagtgaaacttgggcacatgctcaggctactataggtccagaagtccttatgttaagccctggcaggcaggtgtttattaaaattctgaattttggggattttcaaaagataatattttacatacactgtatgttatagaacttcatggatcagatctggggcagcaacctataaatcaacaccttaatatgctgcaacaaaatgtagaatattcagacaaaatggatacataaagactaagtagcccataaggggtcaaaatttgctgccaaatgcgtatgccaccaacttacaaaaacacttcgttcgcagagcttttcagattgtggaatgttggataaggaattatagacctctagtagctgaaatgcaagaccccaagaggaagttcagatcttaatataaattcactttcatttttgatagctgtcccatctggtcatgtggttggcactagactggtggcaggggcttctagctgactcgcacagggattctcacaatagccgatatcagaatttgtgttgaaggaacttgtctcttcatctaatatgatagcgggaaaaggagaggaaactactgcctttagaaaatataagtaaagtgattaaagtgctcacgttaccttgacacatagtttttcagtctatgggtttagttactttagatggcaagcatgtaacttatattaatagtaatttgtaaagttgggtggataagctatccctgttgccggttcatggattacttctctataaaaaatatatatttaccaaaaaattttgtgacattccttctcccatctcttccttgacatgcattgtaaataggttcttcttgttctgagattcaatattgaatttctcctatgctattgacaataaaatattattgaactacc

SEQ ID NO: 12 - protein, 375 aa, Homo sapiens
MDALQLANSAFAVDLFKQLCEKEPLGNVLFSPICLSTSLSLAQVGAKGDTANEIGQVLHFENVKDIPFGFQTVTSDVNKLSSFYSLKLIKRLYVDKSLNLSTEFISSTKRPYAKELETVDFKDKLEETKGQINNSIKDLTDGHFENILADNSVNDQTKILVVNAAYFVGKWMKKFPESETKECPFRLNKTDTKPVQMMNMEATFCMGNIDSINCKIIELPFQNKHLSMFILLPKDVEDESTGLEKIEKQLNSESLSQWTNPSTMANAKVKLSIPKFKVEKMIDPKACLENLGLKHIFSEDTSDFSGMSETKGVALSNVIHKVCLEITEDGGDSIEVPGARILQHKDELNADHPFIYIIRHNKTRNIIFFGKFCSP

SEQ ID NO: 13 - DNA, 2270 bp, Homo sapiens
ctcctccagcctctcacactctcctcagctctctcatctcctggaaccatggccagcacatccaccaccatcaggagccacagcagcagccgccggggtttcagtgccaactcagccaggctccctggggtcagccgctctggcttcagcagcgtctccgtgtcccgctccaggggcagtggtggcctgggtggtgcatgtggaggagctggctttggcagccgcagtctgtatggcctggggggctccaagaggatctccattggagggggcagctgtgccatcagtggcggctatggcagcagagccggaggcagctatggctttggtggcgccgggagtggatttggtttcggtggtggagccggcattggctttggtctgggtggtggagccggccttgctggtggctttgggggccctggcttccctgtgtgcccccctggaggcatccaagaggtcaccgtcaaccagagtctcctgactcccctcaacctgcaaatcgatcccaccatccagcgggtgcgggctgaggagcgtgaacagatcaagaccctcaacaacaagtttgcctccttcatcgacaaggtgcggttcctggagcagcagaacaaggttctggaaacaaagtggaccctgctgcaggagcagggcaccaagactgtgaggcagaacctggagccgttgttcgagcagtacatcaacaacctcaggaggcagctggacagcattgtcggggaacggggccgcctggactcagagctcagaggcatgcaggacctggtggaggacttcaagaacaaatatgaggatgaaatcaacaagcgcacagcagcagagaatgaatttgtgactctgaagaaggatgtggatgctgcctacatgaacaaggttgaactgcaagccaaggcagacactctcacagacgagatcaacttcctgagagccttgtatgatgcagagctgtcccagatgcagacccacatctcagacacatctgtggtgctgtccatggacaacaaccgcaacctggacctggacagcatcatcgctgaggtcaaggcccaatatgaggagattgctcagagaagccgggctgaggctgagtcctggtaccagaccaagtacgaggagctgcaggtcacagcaggcagacatggggacgacctgcgcaacaccaagcaggagattgctgagatcaaccgcatgatccagaggctgagatctgagatcgaccacgtcaagaagcagtgcgccaacctgcaggccgccattgctgatgctgagcagcgtggggagatggccctcaaggatgccaagaacaagctggaagggctggaggatgccctgcagaaggccaagcaggacctggcccggctgctgaaggagtaccaggagctgatgaatgtcaagctggccctggacgtggagatcgccacctaccgcaagctgctggagggtgaggagtgcaggctgaatggcgaaggcgttggacaagtcaacatctctgtggtgcagtccaccgtctccagtggctatggcggtgccagtggtgtcggcagtggcttaggcctgggtggaggaagcagctactcctatggcagtggtcttggcgttggaggtggcttcagttccagcagtggcagagccattgggggtggcctcagctctgttggaggcggcagttccaccatcaagtacaccaccacctcctcctccagcaggaagagctataagcactaaagtgcgtctgctagctctcggtcccacagtcctcaggcccctctctggctgcagagccctctcctcaggttgcctgtcctctcctggcctccagtctcccctgctgtcccaggtagagctggggatgaatgcttagtgccctcacttcttctctctctctctataccatctgagcacccattgctcaccatcagatcaacctctgattttacatcatgatgtaatcaccactggagcttcactgttactaaattattaatttcttgcctccagtgttctatctctgaggctgagcattataagaaaatgacctctgctccttttcattgcagaaaattgccaggggcttatttcagaacaacttccacttactttccactggctctcaaactctctaacttataagtgttgtgaacccccacccaggcagtatccatgaaagcacaagtgactagtcctatgatgtacaaagcctgtatctctgtgatgatttctgtgctcttcactgtttgcaattgctaaataaa

SEQ ID NO: 14 - protein, 564 aa, Homo sapiens
MASTSTTIRSHSSSRRGFSANSARLPGVSRSGFSSVSVSRSRGSGGLGGACGGAGFGSRSLYGLGGSKRISIGGGSCAISGGYGSRAGGSYGFGGAGSGFGFGGGAGIGFGLGGGAGLAGGFGGPGFPVCPPGGIQEVTVNQSLLTPLNLQIDPTIQRVRAEEREQIKTLNNKFASFIDKVRFLEQQNKVLETKWTLLQEQGTKTVRQNLEPLFEQYINNLRRQLDSIVGERGRLDSELRGMQDLVEDFKNKYEDEINKRTAAENEFVTLKKDVDAAYMNKVELQAKADTLTDEINFLRALYDAELSQMQTHISDTSVVLSMDNNRNLDLDSIIAEVKAQYEEIAQRSRAEAESWYQTKYEELQVTAGRHGDDLRNTKQEIAEINRMIQRLRSEIDHVKKQCANLQAAIADAEQRGEMALKDAKNKLEGLEDALQKAKQDLARLLKEYQELMNVKLALDVEIATYRKLLEGEECRLNGEGVGQVNISVVQSTVSSGYGGASGVGSGLGLGGGSSYSYGSGLGVGGGFSSSSGRAIGGGLSSVGGGSSTIKYTTTSSSSRKSYKH

SEQ ID NO: 15 - DNA, 2381 bp, Homo sapiens
cactgaataaactctaggttcccatttctttcagccagatcctcccagggaatcactacaggctggttagccaaaaagtcctgattttctgctcaatagaggtccttactggaaggcagcatgtccaatgttaccttgagaaaaatgtctcccacaggaaatgagatgaagagcaccactcagggaaccacacggaagcagcaggattttcacgaggtgaacaaaagaagaactttcttacaggataacagttggataaagaaacgccctgaagaagaaaaagatgaaaattacggtagggtggtgctcaaccgacataattcccatgatgcattggacaggaaagtaaatgagagagatgtgccaaaagctacaattagtcggtacagttctgatgacactttggacaggatctcagacagaaatgatgctgctaaaacatataaggccaataccttggataaccaactaaccaataggagcatgtccatgtttagatcactggaagtaacaaagttgcaacctggcggttcattgaatgccaacacctccaacaccatagcatccacttctgctactactcctgtaaagaagaagaggcagtcctggtttccaccgccccctccaggttacaatgcctcttcgagcacaggaaccaggagacgggaaccaggtgttcaccctccaatacctccaaagcccagttctcctgtttcttctcctaaccagctgagacaggataataggcagatacatccacctaaaccaggtgtatatacagaaaccaacagatctgctgaaagaaatataagtgaagaattggataatctcatcaaaatgaacaaaagcttgaataggaatcaaggtcttgatagtctcttcagagcaaatccaaaggtagaagaaagagagaaaagagccaaaagccttgaaagtctcatctatatgagtacccggacagataaagatggcaaaggaatccaaagccttggaagtccgattaaagttaatcaaaggactgacaaaaatgagaaaggaagacaaaatctcgaatctgttgctaaagtgaatgccaggatgaataaaacgagcagaagaagtgaagaccttgataatgctactgaagtaaatcccaaaggacatgaaaataccactggaaaaaaagaccttgatgggcttattaaagtggatcctgaaacaaataaaaatattacgaggggccagagccttgataatctcatcaaagtgacccctgaagtaaagagaagtaaccaaggttccaaagaccttaataacttcatcaaagtgtatccaggaacagaaaaaagtactgaagggggccaaagtctcgacagcctcattaaagtgactcctgaaagaaacagaactaaccaagggaaccaagacttggaaaatcttatcaaagtgatcccttcagcaaacaaaagcagtgaacaaggtcttgatgaacatattaatgtcagccccaaagctgtcaaaaacactgatggaaaacaagatcttgataaactcatcaaggtgaatcctgaaattttcacaaacaaccaaagaaaccaagatcttgctaacctcatcaaagtaaatcctgcagtaatcagaaacaatcagagccaagacttggaaaatcttatcaaagtgatcccttcagctcttagaaacactaatcgagaccagaacctggaaaatttaattgaagtaaattctcatgtgtctgaaaacaagaatggaagctctaacactggagccaagcaggcaggaccacaggatactgttgtgtacacaaggacatatgtggagaatagtaaatcacccaaggatggatatcaggagaatatctctggaaaatacatacaaactgtttattcaacttctgataggtctgtcattgaaagagatatgtgcacttactgccgaaaacccttgggtgtagaaactaaaatgattttagatgaattacaaatttgctgccattctacttgctttaagtgtgaaatatgcaagcagcctttggaaaatctacaagcgggtgatagtatttggatttatagacagacaatacactgtgaaccttgctactctaaaattatggcaaagtggattccataactctggcacaaggaaatcaagatgaaaagcactcattaaggaattaaagttacaagttttatcttaataatatgtaatctagaaaagctttcacattgaagatcaactcttgtacaaaattaacaattctgttattgcataagtaatctaattgtcttcaataaggtcacacacataaaaagagccatctggtctctggctagagttagcaataaaaagttcaaatggttccagaaaaaaaaaaaaaaaaaaaa

SEQ ID NO: 16 - protein, 668 aa, Homo sapiens
MSNVTLRKMSPTGNEMKSTTQGTTRKQQDFHEVNKRRTFLQDNSWIKKRPEEEKDENYGRVVLNRHNSHDALDRKVNERDVPKATISRYSSDDTLDRISDRNDAAKTYKANTLDNQLTNRSMSMFRSLEVTKLQPGGSLNANTSNTIASTSATTPVKKKRQSWFPPPPPGYNASSSTGTRRREPGVHPPIPPKPSSPVSSPNQLRQDNRQIHPPKPGVYTETNRSAERNISEELDNLIKMNKSLNRNQGLDSLFRANPKVEEREKRAKSLESLIYMSTRTDKDGKGIQSLGSPIKVNQRTDKNEKGRQNLESVAKVNARMNKTSRRSEDLDNATEVNPKGHENTTGKKDLDGLIKVDPETNKNITRGQSLDNLIKVTPEVKRSNQGSKDLNNFIKVYPGTEKSTEGGQSLDSLIKVTPERNRTNQGNQDLENLIKVIPSANKSSEQGLDEHINVSPKAVKNTDGKQDLDKLIKVNPEIFTNNQRNQDLANLIKVNPAVIRNNQSQDLENLIKVIPSALRNTNRDQNLENLIEVNSHVSENKNGSSNTGAKQAGPQDTVVYTRTYVENSKSPKDGYQENISGKYIQTVYSTSDRSVIERDMCTYCRKPLGVETKMILDELQICCHSTCFKCEICKQPLENLQAGDSIWIYRQTIHCEPCYSKIMAKWIP

SEQ ID NO: 17 - DNA, 4465 bp, Homo sapiens
caattgtcatacgacttgcagtgagcgtcaggagcacgtccaggaactcctcagcagcgcctccttcagctccacagccagacgccctcagacagcaaagcctacccccgcgccgcgccctgcccgccgctcggatgctcgcccgcgccctgctgctgtgcgcggtcctggcgctcagccatacagcaaatccttgctgttcccacccatgtcaaaaccgaggtgtatgtatgagtgtgggatttgaccagtataagtgcgattgtacccggacaggattctatggagaaaactgctcaacaccggaatttttgacaagaataaaattatttctgaaacccactccaaacacagtgcactacatacttacccacttcaagggattttggaacgttgtgaataacattcccttccttcgaaatgcaattatgagttatgtcttgacatccagatcacatttgattgacagtccaccaacttacaatgctgactatggctacaaaagctgggaagccttctctaacctctcctattatactagagcccttcctcctgtgcctgatgattgcccgactcccttgggtgtcaaaggtaaaaagcagcttcctgattcaaatgagattgtggaaaaattgcttctaagaagaaagttcatccctgatccccagggctcaaacatgatgtttgcattctttgcccagcacttcacgcatcagtttttcaagacagatcataagcgagggccagctttcaccaacgggctgggccatggggtggacttaaatcatatttacggtgaaactctggctagacagcgtaaactgcgccttttcaaggatggaaaaatgaaatatcagataattgatggagagatgtatcctcccacagtcaaagatactcaggcagagatgatctaccctcctcaagtccctgagcatctacggtttgctgtggggcaggaggtctttggtctggtgcctggtctgatgatgtatgccacaatctggctgcgggaacacaacagagtatgcgatgtgcttaaacaggagcatcctgaatggggtgatgagcagttgttccagacaagcaggctaatactgataggagagactattaagattgtgattgaagattatgtgcaacacttgagtggctatcacttcaaactgaaatttgacccagaactacttttcaacaaacaattccagtaccaaaatcgtattgctgctgaatttaacaccctctatcactggcatccccttctgcctgacacctttcaaattcatgaccagaaatacaactatcaacagtttatctacaacaactctatattgctggaacatggaattacccagtttgttgaatcattcaccaggcaaattgctggcagggttgctggtggtaggaatgttccacccgcagtacagaaagtatcacaggcttccattgaccagagcaggcagatgaaataccagtcttttaatgagtaccgcaaacgctttatgctgaagccctatgaatcatttgaagaacttacaggagaaaaggaaatgtctgcagagttggaagcactctatggtgacatcgatgctgtggagctgtatcctgcccttctggtagaaaagcctcggccagatgccatctttggtgaaaccatggtagaagttggagcaccattctccttgaaaggacttatgggtaatgttatatgttctcctgcctactggaagccaagcacttttggtggagaagtgggttttcaaatcatcaacactgcctcaattcagtctctcatctgcaataacgtgaagggctgtccctttacttcattcagtgttccagatccagagctcattaaaacagtcaccatcaatgcaagttcttcccgctccggactagatgatatcaatcccacagtactactaaaagaacgttcgactgaactgtagaagtctaatgatcatatttatttatttatatgaaccatgtctattaatttaattatttaataatatttatattaaactccttatgttacttaacatcttctgtaacagaagtcagtactcctgttgcggagaaaggagtcatacttgtgaagacttttatgtcactactctaaagattttgctgttgctgttaagtttggaaaacagtttttattctgttttataaaccagagagaaatgagttttgacgtctttttacttgaatttcaacttatattataagaacgaaagtaaagatgtttgaatacttaaacactatcacaagatggcaaaatgctgaaagtttttacactgtcgatgtttccaatgcatcttccatgatgcattagaagtaactaatgtttgaaattttaaagtacttttggttatttttctgtcatcaaacaaaaacaggtatcagtgcattattaaatgaatatttaaattagacattaccagtaatttcatgtctactttttaaaatcagcaatgaaacaataatttgaaatttctaaattcatagggtagaatcacctgtaaaagcttgtttgatttcttaaagttattaaacttgtacatataccaaaaagaagctgtcttggatttaaatctgtaaaatcagatgaaattttactacaattgcttgttaaaatattttataagtgatgttcctttttcaccaagagtataaacctttttagtgtgactgttaaaacttccttttaaatcaaaatgccaaatttattaaggtggtggagccactgcagtgttatctcaaaataagaatattttgttgagatattccagaatttgtttatatggctggtaacatgtaaaatctatatcagcaaaagggtctacctttaaaataagcaataacaaagaagaaaaccaaattattgttcaaatttaggtttaaacttttgaagcaaacttttttttatccttgtgcactgcaggcctggtactcagattttgctatgaggttaatgaagtaccaagctgtgcttgaataacgatatgttttctcagattttctgttgtacagtttaatttagcagtccatatcacattgcaaaagtagcaatgacctcataaaatacctcttcaaaatgcttaaattcatttcacacattaattttatctcagtcttgaagccaattcagtaggtgcattggaatcaagcctggctacctgcatgctgttccttttcttttcttcttttagccattttgctaagagacacagtcttctcatcacttcgtttctcctattttgttttactagttttaagatcagagttcactttctttggactctgcctatattttcttacctgaacttttgcaagttttcaggtaaacctcagctcaggactgctatttagctcctcttaagaagattaaaagagaaaaaaaaaggcccttttaaaaatagtatacacttattttaagtgaaaagcagagaattttatttatagctaattttagctatctgtaaccaagatggatgcaaagaggctagtgcctcagagagaactgtacggggtttgtgactggaaaaagttacgttcccattctaattaatgccctttcttatttaaaaacaaaaccaaatgatatctaagtagttctcagcaataataataatgacgataatacttcttttccacatctcattgtcactgacatttaatggtactgtatattacttaatttattgaagattattatttatgtcttattaggacactatggttataaactgtgtttaagcctacaatcattgatttttttttgttatgtcacaatcagtatattttctttggggttacctctctgaatattatgtaaacaatccaaagaaatgattgtattaagatttgtgaataaatttttagaaatctgattggcatattgagatatttaaggttgaatgtttgtccttaggataggcctatgtgctagcccacaaagaatattgtctcattagcctgaatgtgccataagactgaccttttaaaatgttttgagggatctgtggatgcttcgttaatttgttcagccacaatttattgagaaaatattctgtgtcaagcactgtgggttttaatatttttaaatcaaacgctgattacagataatagtatttatataaataattgaaaaaaattttcttttgggaagagggagaaaatgaaataaatatcattaaagataactcaggagaatcttctttacaattttacgtttagaatgtttaaggttaagaaagaaatagtcaatatgcttgtataaaacactgttcactgttttttttaaaaaaaaaacttgatttgttattaacattgatctgctgacaaaacctgggaatttgggttgtgtatgcgaatgtttcagtgcctcagacaaatgtgtatttaacttatgtaaaagataagtctggaaataaatgtctgtttatttttgtactattta

SEQ ID NO: 18 - protein, 604 aa, Homo sapiens
MLARALLLCAVLALSHTANPCCSHPCQNRGVCMSVGFDQYKCDCTRTGFYGENCSTPEFLTRIKLFLKPTPNTVHYILTHFKGFWNVVNNIPFLRNAIMSYVLTSRSHLIDSPPTYNADYGYKSWEAFSNLSYYTRALPPVPDDCPTPLGVKGKKQLPDSNEIVEKLLLRRKFIPDPQGSNMMFAFFAQHFTHQFFKTDHKRGPAFTNGLGHGVDLNHIYGETLARQRKLRLFKDGKMKYQIIDGEMYPPTVKDTQAEMIYPPQVPEHLRFAVGQEVFGLVPGLMMYATIWLREHNRVCDVLKQEHPEWGDEQLFQTSRLILIGETIKIVIEDYVQHLSGYHFKLKFDPELLFNKQFQYQNRIAAEFNTLYHWHPLLPDTFQIHDQKYNYQQFIYNNSILLEHGITQFVESFTRQIAGRVAGGRNVPPAVQKVSQASIDQSRQMKYQSFNEYRKRFMLKPYESFEELTGEKEMSAELEALYGDIDAVELYPALLVEKPRPDAIFGETMVEVGAPFSLKGLMGNVICSPAYWKPSTFGGEVGFQIINTASIQSLICNNVKGCPFTSFSVPDPELIKTVTINASSSRSGLDDINPTVLLKERSTEL

SEQ ID NO: 19 - DNA, 970 bp, Homo sapiens
ctcccctcaccccggtccaggatgcccagtccccacgacacctcccacttcccactgtggcctgggtgggctcaggggctgcccttgacctggcctagagccctcccccagctggtggtggagctggcactctctgggagggagggggctgggagggaatgagtgggaatggcaagaggccagggtttggtgggatcaggttgaggcaggtttggtttccttaaaatgccaagttgggggccagtggggcccacatataaatcctcaccctgggagcctggctgccttgctctccttcctgggtctgtctctgccacctggtctgccacagatccatgatgtgcagttctctggagcaggcgctggctgtgctggtcactaccttccacaagtactcctgccaagagggcgacaagttcaagctgagtaagggggaaatgaaggaacttctgcacaaggagctgcccagctttgtgggggagaaagtggatgaggaggggctgaagaagctgatgggcagcctggatgagaacagtgaccagcaggtggacttccaggagtatgctgttttcctggcactcatcactgtcatgtgcaatgacttcttccagggctgcccagaccgaccctgaagcagaactcttgacttcctgccatggatctcttgggcccaggactgttgatgcctttgagttttgtattcaataaactttttttgtctgttgataatattttaattgctcagtgatgttccataacccggctggctcagctggagtgctgggagatgagggcctcctggatcctgctcccttctgggctctgactctcctggaaatctctccaaggccagagctatgctttaggtctcaattttggaatttcaaacaccagcaaaaaattggaaatcgagataggttgctgacttttattttgtcaaataaagatattaaaaaaggcaaaaaaaaaa

SEQ ID NO: 20 - protein, 97 aa, Homo sapiens
MCSSLEQALAVLVTTFHKYSCQEGDKFKLSKGEMKELLHKELPSFVGEKVDEEGLKKLMGSLDENSDQQVDFQEYAVFLALITVMCNDFFQGCPDRP

SEQ ID NO: 21 - DNA, 1753 bp, Homo sapiens
cagccccgcccctacctgtggaagcccagccgcccgctcccgcggataaaaggcgcggagtgtccccgaggtcagcgagtgcgcgctcctcctcgcccgccgctaggtccatcccggcccagccaccatgtccatccacttcagctccccggtattcacctcgcgctcagccgccttctcgggccgcggcgcccaggtgcgcctgagctccgctcgccccggcggccttggcagcagcagcctctacggcctcggcgcctcacggccgcgcgtggccgtgcgctctgcctatgggggcccggtgggcgccggcatccgcgaggtcaccattaaccagagcctgctggccccgctgcggctggacgccgacccctccctccagcgggtgcgccaggaggagagcgagcagatcaagaccctcaacaacaagtttgcctccttcatcgacaaggtgcggtttctggagcagcagaacaagctgctggagaccaagtggacgctgctgcaggagcagaagtcggccaagagcagccgcctcccagacatctttgaggcccagattgctggccttcggggtcagcttgaggcactgcaggtggatgggggccgcctggaggcggagctgcggagcatgcaggatgtggtggaggacttcaagaataagtacgaagatgaaattaaccaccgcacagctgctgagaatgagtttgtggtgctgaagaaggatgtggatgctgcctacatgagcaaggtggagctggaggccaaggtggatgccctgaatgatgagatcaacttcctcaggaccctcaatgagacggagttgacagagctgcagtcccagatctccgacacatctgtggtgctgtccatggacaacagtcgctccctggacctggacggcatcatcgctgaggtcaaggcgcagtatgaggagatggccaaatgcagccgggctgaggctgaagcctggtaccagaccaagtttgagaccctccaggcccaggctgggaagcatggggacgacctccggaatacccggaatgagatttcagagatgaaccgggccatccagaggctgcaggctgagatcgacaacatcaagaaccagcgtgccaagttggaggccgccattgccgaggctgaggagcgtggggagctggcgctcaaggatgctcgtgccaagcaggaggagctggaagccgccctgcagcggggcaagcaggatatggcacggcagctgcgtgagtaccaggaactcatgagcgtgaagctggccctggacatcgagatcgccacctaccgcaagctgctggagggcgaggagagccggttggctggagatggagtgggagccgtgaatatctctgtgatgaattccactggtggcagtagcagtggcggtggcattgggctgaccctcgggggaaccatgggcagcaatgccctgagcttctccagcagtgcgggtcctgggctcctgaaggcttattccatccggaccgcatccgccagtcgcaggagtgcccgcgactgagccgcctcccaccactccactcctccagccaccacccacaatcacaagaagattcccacccctgcctcccatgcctggtcccaagacagtgagacagtctggaaagtgatgtcagaatagcttccaataaagcagcctcattctgaggcctgagtgatccacgtgaaaaaaaaaaaaaaaaaaaaaaaaaaaaaaaaaaaaaaaaaaaaaaaaaaa

SEQ ID NO: 22 - protein, 469 aa, Homo sapiens
MSIHFSSPVFTSRSAAFSGRGAQVRLSSARPGGLGSSSLYGLGASRPRVAVRSAYGGPVGAGIREVTINQSLLAPLRLDADPSLQRVRQEESEQIKTLNNKFASFIDKVRFLEQQNKLLETKWTLLQEQKSAKSSRLPDIFEAQIAGLRGQLEALQVDGGRLEAELRSMQDVVEDFKNKYEDEINHRTAAENEFVVLKKDVDAAYMSKVELEAKVDALNDEINFLRTLNETELTELQSQISDTSVVLSMDNSRSLDLDGIIAEVKAQYEEMAKCSRAEAEAWYQTKFETLQAQAGKHGDDLRNTRNEISEMNRAIQRLQAEIDNIKNQRAKLEAAIAEAEERGELALKDARAKQEELEAALQRGKQDMARQLREYQELMSVKLALDIEIATYRKLLEGEESRLAGDGVGAVNISVMNSTGGSSSGGGIGLTLGGTMGSNALSFSSSAGPGLLKAYSIRTASASRRSARD

SEQ ID NO: 23 - DNA, 1145 bp, Homo sapiens
attctctccccagcttgctgagccctttgctcccctggcgactgcctggacagtcagcaaggaattgtctcccagtgcattttgccctcctggctgccaactctggctgctaaagcggctgccacctgctgcagtctacacagcttcgggaagaggaaaggaacctcagaccttccagatcgcttcctctcgcaacaaactatttgtcgcaggaataaagatggctgctgaaccagtagaagacaattgcatcaactttgtggcaatgaaatttattgacaatacgctttactttatagctgaagatgatgaaaacctggaatcagattactttggcaagcttgaatctaaattatcagtcataagaaatttgaatgaccaagttctcttcattgaccaaggaaatcggcctctatttgaagatatgactgattctgactgtagagataatgcaccccggaccatatttattataagtatgtataaagatagccagcctagaggtatggctgtaactatctctgtgaagtgtgagaaaatttcaactctctcctgtgagaacaaaattatttcctttaaggaaatgaatcctcctgataacatcaaggatacaaaaagtgacatcatattctttcagagaagtgtcccaggacatgataataagatgcaatttgaatcttcatcatacgaaggatactttctagcttgtgaaaaagagagagacctttttaaactcattttgaaaaaagaggatgaattgggggatagatctataatgttcactgttcaaaacgaagactagctattaaaatttcatgccgggcgcagtggctcacgcctgtaatcccagccctttgggaggctgaggcgggcagatcaccagaggtcaggtgttcaagaccagcctgaccaacatggtgaaacctcatctctactaaaaatacaaaaaattagctgagtgtagtgacgcatgccctcaatcccagctactcaagaggctgaggcaggagaatcacttgcactccggaggtagaggttgtggtgagccgagattgcaccattgcgctctagcctgggcaacaacagcaaaactccatctcaaaaaataaaataaataaataaacaaataaaaaattcataatgtg

SEQ ID NO: 24 - protein, 193 aa, Homo sapiens
MAAEPVEDNCINFVAMKFIDNTLYFIAEDDENLESDYFGKLESKLSVIRNLNDQVLFIDQGNRPLFEDMTDSDCRDNAPRTIFIISMYKDSQPRGMAVTISVKCEKISTLSCENKIISFKEMNPPDNIKDTKSDIIFFQRSVPGHDNKMQFESSSYEGYFLACEKERDLFKLILKKEDELGDRSIMFTVQNED

SEQ ID NO: 25 - DNA, 1634 bp, Homo sapiens
gggtggggaagcttagagaccggtgagggagcagagctggggcgcctgtgtacagggatagagcccggcggcagcagggcgcggcttccctttcccggggcctggggccgcaatcaggtggagtcgagaggccggaggaggggcaggaggaaggggtgcggtcgcgatccggacccggagccagcgcggagcacctgcgcccgcggctgacaccttcgctcgcagtttgttcgcagtttactcgcacaccagtttcccccaccgcgctttggattagtgtgatctcagctcaaggcaaaggtgggatatcatggcatctatctgggttggacaccgaggaacagtaagagattatccagactttagcccatcagtggatgctgaagctattcagaaagcaatcagaggaattggaactgatgagaaaatgctcatcagcattctgactgagaggtcaaatgcacagcggcagctgattgttaaggaatatcaagcagcatatggaaaggagctgaaagatgacttgaagggtgatctctctggccactttgagcatctcatggtggccctagtgactccaccagcagtctttgatgcaaagcagctaaagaaatccatgaagggcgcgggaacaaacgaagatgccttgattgaaatcttaactaccaggacaagcaggcaaatgaaggatatctctcaagcctattatacagtatacaagaagagtcttggagatgacattagttccgaaacatctggtgacttccggaaagctctgttgactttggcagatggcagaagagatgaaagtctgaaagtggatgagcatctggccaaacaagatgcccagattctctataaagctggtgagaacagatggggcacggatgaagacaaattcactgagatcctgtgtttaaggagctttcctcaattaaaactaacatttgatgaatacagaaatatcagccaaaaggacattgtggacagcataaaaggagaattatctgggcattttgaagacttactgttggccatagttaattgtgtgaggaacacgccggcctttttagccgaaagactgcatcgagccttgaagggtattggaactgatgagtttactctgaaccgaataatggtgtccagatcagaaattgaccttttggacattcgaacagagttcaagaagcattatggctattccctatattcagcaattaaatcggatacttctggagactatgaaatcacactcttaaaaatctgtggtggagatgactgaaccaagaagataatctccaaaggtccacgatgggctttcccaacagctccaccttacttcttctcatactatttaagagaacaagcaaatataaacagcaacttgtgttcctaacaggaattttcattgttctataacaacaacaacaaaagcgattattattttagagcatctcatttataatgtagcagctcataaatgaaattgaaaatggtattaaagatctgcaactactatccaacttatatttctgctttcaaagttaagaatctttatagttctactccattaaatataaagcaagataataaaaattgttgcttttgttaaaagtaaaaaaaaaaaaaaaaaa

SEQ ID NO: 26 - protein, 323 aa, Homo sapiens
MASIWVGHRGTVRDYPDFSPSVDAEAIQKAIRGIGTDEKMLISILTERSNAQRQLIVKEYQAAYGKELKDDLKGDLSGHFEHLMVALVTPPAVFDAKQLKKSMKGAGTNEDALIEILTTRTSRQMKDISQAYYTVYKKSLGDDISSETSGDFRKALLTLADGRRDESLKVDEHLAKQDAQILYKAGENRWGTDEDKFTEILCLRSFPQLKLTFDEYRNISQKDIVDSIKGELSGHFEDLLLAIVNCVRNTPAFLAERLHRALKGIGTDEFTLNRIMVSRSEIDLLDIRTEFKKHYGYSLYSAIKSDTSGDYEITLLKICGGDD

SEQ ID NO: 27 - DNA, 623 bp, Homo sapiens
aggccaagctggactgcataaagattggtatggccttagctcttagccaaacaccttcctgacaccatgagggccagcagcttcttgatcgtggtggtgttcctcatcgctgggacgctggttctagaggcagctgtcacgggagttcctgttaaaggtcaagacactgtcaaaggccgtgttccattcaatggacaagatcccgttaaaggacaagtttcagttaaaggtcaagataaagtcaaagcgcaagagccagtcaaaggtccagtctccactaagcctggctcctgccccattatcttgatccggtgcgccatgttgaatccccctaaccgctgcttgaaagatactgactgcccaggaatcaagaagtgctgtgaaggctcttgcgggatggcctgtttcgttccccagtgagagggagccggtccttgctgcacctgtgccgtccccagagctacaggccccatctggtcctaagtccctgctgcccttccccttcccacactgtccattcttcctcccattcaggatgcccacggctggagctgcctctctcatccactttccaataaagagttccttctgctccaaaaaaaaaaaaaaaaaaaaaaaaaaaa

SEQ ID NO: 28 - protein, 117 aa, Homo sapiens
MRASSFLIVVVFLIAGTLVLEAAVTGVPVKGQDTVKGRVPFNGQDPVKGQVSVKGQDKVKAQEPVKGPVSTKPGSCPIILIRCAMLNPPNRCLKDTDCPGIKKCCEGSCGMACFVPQ

SEQ ID NO: 29 - DNA, 1498 bp, Homo sapiens
ttacattagcaagagagcaagttgttccagtagttgcctggcaggagaatttgaaagggtgccccaaaggacaatctctaaaggggtaagggagatacctaccttgtctggtaggggagatgtttcgttttcatgctttaccagaaaatccacttccctgctgaccttagtttcaaagcttattcttaattagagacaagaaacctgtttcaacttgaagacaccgtatgaggtgaatggacagccagccaccacaatgaaagaaatcaaaccaggaataacctatgctgaacccacgcctcaatcgtccccaagtgtttcctgacacgcatctttgcttacagtgcatcacaactgaagaatggggttcaacttgacgcttgcaaaattaccaaataacgagctgcacggccaagagagtcacaattcaggcaacaggagcgacgggccaggaaagaacaccacccttcacaatgaatttgacacaattgtcttgccggtgctttatctcattatatttgtggcaagcatcttgctgaatggtttagcagtgtggatcttcttccacattaggaataaaaccagcttcatattctatctcaaaaacatagtggttgcagacctcataatgacgctgacatttccatttcgaatagtccatgatgcaggatttggaccttggtacttcaagtttattctctgcagatacacttcagttttgttttatgcaaacatgtatacttccatcgtgttccttgggctgataagcattgatcgctatctgaaggtggtcaagccatttggggactctcggatgtacaacataaccttcacgaaggttttatctgtttgtgtttgggtgatcatggctgttttgtctttgccaaacatcatcctgacaaatggtcagccaacagaggacaatatccatgactgctcaaaacttaaaagtcctttgggggtcaaatggcatacggcagtcacctatgtgaacagctgcttgtttgtggccgtgctggtgattctgatcggatgttacatagccatatccaggtacatccacaaatccagcaggcaattcataagtcagtcaagccgaaagcgaaaacataaccagagcatcagggttgttgtggctgtgttttttacctgctttctaccatatcacttgtgcagaattccttttacttttagtcacttagacaggcttttagatgaatctgcacaaaaaatcctatattactgcaaagaaattacacttttcttgtctgcgtgtaatgtttgcctggatccaataatttactttttcatgtgtaggtcattttcaagaaggctgttcaaaaaatcaaatatcagaaccaggagtgaaagcatcagatcactgcaaagtgtgagaagatcggaagttcgcatatattatgattatactgatgtgtaggccttttattgtttgttggaatcgatatgtacaaagtgtaaataaatgtttcttttcatt

SEQ ID NO: 30 - protein, 358 aa, Homo sapiens
MGFNLTLAKLPNNELHGQESHNSGNRSDGPGKNTTLHNEFDTIVLPVLYLIIFVASILLNGLAVWIFFHIRNKTSFIFYLKNIVVADLIMTLTFPFRIVHDAGFGPWYFKFILCRYTSVLFYANMYTSIVFLGLISIDRYLKVVKPFGDSRMYNITFTKVLSVCVWVIMAVLSLPNIILTNGQPTEDNIHDCSKLKSPLGVKWHTAVTYVNSCLFVAVLVILIGCYIAISRYIHKSSRQFISQSSRKRKHNQSIRVVVAVFFTCFLPYHLCRIPFTFSHLDRLLDESAQKILYYCKEITLFLSACNVCLDPIIYFFMCRSFSRRLFKKSNIRTRSESIRSLQSVRRSEVRIYYDYTDV

SEQ ID NO: 31 - DNA, 1270 bp, Homo sapiens
agacgttcgcacacctgggtgccagcgccccagaggtcccgggacagcccgaggcgccgcgcccgccgccccgagctccccaagccttcgagagcggcgcacactcccggtctccactcgctcttccaacacccgctcgttttggcggcagctcgtgtcccagagaccgagttgccccagagaccgagacgccgccgctgcgaaggaccaatgagagccccgctgctaccgccggcgccggtggtgctgtcgctcttgatactcggctcaggccattatgctgctggattggacctcaatgacacctactctgggaagcgtgaaccattttctggggaccacagtgctgatggatttgaggttacctcaagaagtgagatgtcttcagggagtgagatttcccctgtgagtgaaatgccttctagtagtgaaccgtcctcgggagccgactatgactactcagaagagtatgataacgaaccacaaatacctggctatattgtcgatgattcagtcagagttgaacaggtagttaagcccccccaaaacaagacggaaagtgaaaatacttcagataaacccaaaagaaagaaaaagggaggcaaaaatggaaaaaatagaagaaacagaaagaagaaaaatccatgtaatgcagaatttcaaaatttctgcattcacggagaatgcaaatatatagagcacctggaagcagtaacatgcaaatgtcagcaagaatatttcggtgaacggtgtggggaaaagtccatgaaaactcacagcatgattgacagtagtttatcaaaaattgcattagcagccatagctgcctttatgtctgctgtgatcctcacagctgttgctgttattacagtccagcttagaagacaatacgtcaggaaatatgaaggagaagctgaggaacgaaagaaacttcgacaagagaatggaaatgtacatgctatagcataactgaagataaaattacaggatatcacattggagtcactgccaagtcatagccataaatgatgagtcggtcctctttccagtggatcataagacaatggaccctttttgttatgatggttttaaactttcaattgtcactttttatgctatttctgtatataaaggtgcacgaaggtaaaaagtattttttcaagttgtaaataatttatttaatatttaatggaagtgtatttattttacagctcattaaacttttttaaccaaacagaaaaaaaaaaaaaaaaaaaaaaaaaaaaaaaaa

SEQ ID NO: 32 - protein, 252 aa, Homo sapiens
MRAPLLPPAPVVLSLLILGSGHYAAGLDLNDTYSGKREPFSGDHSADGFEVTSRSEMSSGSEISPVSEMPSSSEPSSGADYDYSEEYDNEPQIPGYIVDDSVRVEQVVKPPQNKTESENTSDKPKRKKKGGKNGKNRRNRKKKNPCNAEFQNFCIHGECKYIEHLEAVTCKCQQEYFGERCGEKSMKTHSMIDSSLSKIALAAIAAFMSAVILTAVAVITVQLRRQYVRKYEGEAEERKKLRQENGNVHAIA

SEQ ID NO: 33 - DNA, 1900 bp, Homo sapiens
acaactctcagaggagcattgcccgtcagacagcaactcagagaataaccagagaacaaccagattgaaacaatggaggatctttgtgtggcaaacacactctttgccctcaatttattcaagcatctggcaaaagcaagccccacccagaacctcttcctctccccatggagcatctcgtccaccatggccatggtctacatgggctccaggggcagcaccgaagaccagatggccaaggtgcttcagtttaatgaagtgggagccaatgcagttacccccatgactccagagaactttaccagctgtgggttcatgcagcagatccagaagggtagttatcctgatgcgattttgcaggcacaagctgcagataaaatccattcatccttccgctctctcagctctgcaatcaatgcatccacagggaattatttactggaaagtgtcaataagctgtttggtgagaagtctgcgagcttccgggaagaatatattcgactctgtcagaaatattactcctcagaaccccaggcagtagacttcctagaatgtgcagaagaagctagaaaaaagattaattcctgggtcaagactcaaaccaaaggcaaaatcccaaacttgttacctgaaggttctgtagatggggataccaggatggtcctggtgaatgctgtctacttcaaaggaaagtggaaaactccatttgagaagaaactaaatgggctttatcctttccgtgtaaactcggctcagcgcacacctgtacagatgatgtacttgcgtgaaaagctaaacattggatacatagaagacctaaaggctcagattctagaactcccatatgctggagatgttagcatgttcttgttgcttccagatgaaattgccgatgtgtccactggcttggagctgctggaaagtgaaataacctatgacaaactcaacaagtggaccagcaaagacaaaatggctgaagatgaagttgaggtatacataccccagttcaaattagaagagcattatgaactcagatccattctgagaagcatgggcatggaggacgccttcaacaagggacgggccaatttctcagggatgtcggagaggaatgacctgtttctttctgaagtgttccaccaagccatggtggatgtgaatgaggagggcactgaagcagccgctggcacaggaggtgttatgacagggagaactggacatggaggcccacagtttgtggcagatcatccttttctttttcttattatgcataagataaccaactgcattttatttttcggcagattttcctcaccctaaaactaagcgtgctgcttctgcaaaagatttttgtagatgagctgtgtgcctcagaattgctatttcaaattgccaaaaatttagagatgttttctacatatttctgctcttctgaacaacttctgctacccactaaataaaaacacagaaataattagacaattgtctattataacatgacaaccctattaatcatttggtcttctaaaatgggatcatgcccatttagattttccttactatcagtttatttttataacattaacttttactttgttatttattattttatataatggtgagtttttaaattattgctcactgcctatttaatgtagctaataaagttatagaagcagatgatctgttaatttcctatctaataaatgcctttaattgttctcataatgaagaataagtaggtaccctccatgcccttctgtaataaatatctggaaaaaacattaaacaataggcaaatatatgttatgtgcatttctagaaatacataacacatatatatgtctgtatcttatattcaattgcaagtatataataaataaacctgcttccaaacaac

SEQ ID NO: 34 - protein, 415 aa, Homo sapiens
MEDLCVANTLFALNLFKHLAKASPTQNLFLSPWSISSTMAMVYMGSRGSTEDQMAKVLQFNEVGANAVTPMTPENFTSCGFMQQIQKGSYPDAILQAQAADKIHSSFRSLSSAINASTGNYLLESVNKLFGEKSASFREEYIRLCQKYYSSEPQAVDFLECAEEARKKINSWVKTQTKGKIPNLLPEGSVDGDTRMVLVNAVYFKGKWKTPFEKKLNGLYPFRVNSAQRTPVQMMYLREKLNIGYIEDLKAQILELPYAGDVSMFLLLPDEIADVSTGLELLESEITYDKLNKWTSKDKMAEDEVEVYIPQFKLEEHYELRSILRSMGMEDAFNKGRANFSGMSERNDLFLSEVFHQAMVDVNEEGTEAAAGTGGVMTGRTGHGGPQFVADHPFLFLIMHKITNCILFFGRFSSP

SEQ ID NO: 35 - DNA, 4048 bp, Homo sapiens
ggctgcctcgcaggggctgcgcgcagcggcaagaagtgtctgggctgggacggacaggagaggctgtcgccatcggcgtcctgtgcccctctgctccggcacggccctgtcgcagtgcccgcgctttccccggcgcctgcacgcggcgcgcctgggtaacatgcttggggtcctggtccttggcgcgctggccctggccggcctggggttccccgcacccgcagagccgcagccgggtggcagccagtgcgtcgagcacgactgcttcgcgctctacccgggccccgcgaccttcctcaatgccagtcagatctgcgacggactgcggggccacctaatgacagtgcgctcctcggtggctgccgatgtcatttccttgctactgaacggcgacggcggcgttggccgccggcgcctctggatcggcctgcagctgccacccggctgcggcgaccccaagcgcctcgggcccctgcgcggcttccagtgggttacgggagacaacaacaccagctatagcaggtgggcacggctcgacctcaatggggctcccctctgcggcccgttgtgcgtcgctgtctccgctgctgaggccactgtgcccagcgagccgatctgggaggagcagcagtgcgaagtgaaggccgatggcttcctctgcgagttccacttcccagccacctgcaggccactggctgtggagcccggcgccgcggctgccgccgtctcgatcacctacggcaccccgttcgcggcccgcggagcggacttccaggcgctgccggtgggcagctccgccgcggtggctcccctcggcttacagctaatgtgcaccgcgccgcccggagcggtccaggggcactgggccagggaggcgccgggcgcttgggactgcagcgtggagaacggcggctgcgagcacgcgtgcaatgcgatccctggggctccccgctgccagtgcccagccggcgccgccctgcaggcagacgggcgctcctgcaccgcatccgcgacgcagtcctgcaacgacctctgcgagcacttctgcgttcccaaccccgaccagccgggctcctactcgtgcatgtgcgagaccggctaccggctggcggccgaccaacaccggtgcgaggacgtggatgactgcatactggagcccagtccgtgtccgcagcgctgtgtcaacacacagggtggcttcgagtgccactgctaccctaactacgacctggtggacggcgagtgtgtggagcccgtggacccgtgcttcagagccaactgcgagtaccagtgccagcccctgaaccaaactagctacctctgcgtctgcgccgagggcttcgcgcccattccccacgagccgcacaggtgccagatgttttgcaaccagactgcctgtccagccgactgcgaccccaacacccaggctagctgtgagtgccctgaaggctacatcctggacgacggtttcatctgcacggacatcgacgagtgcgaaaacggcggcttctgctccggggtgtgccacaacctccccggtaccttcgagtgcatctgcgggcccgactcggcccttgcccgccacattggcaccgactgtgactccggcaaggtggacggtggcgacagcggctctggcgagcccccgcccagcccgacgcccggctccaccttgactcctccggccgtggggctcgtgcattcgggcttgctcataggcatctccatcgcgagcctgtgcctggtggtggcgcttttggcgctcctctgccacctgcgcaagaagcagggcgccgccagggccaagatggagtacaagtgcgcggccccttccaaggaggtagtgctgcagcacgtgcggaccgagcggacgccgcagagactctgagcggcctccgtccaggagcctggctccgtccaggagcctgtgcctcctcacccccagctttgctaccaaagcaccttagctggcattacagctggagaagaccctccccgcaccccccaagctgttttcttctattccatggctaactggcgagggggtgattagagggaggagaatgagcctcggcctcttccgtgacgtcactggaccactgggcaatgatggcaattttgtaacgaagacacagactgcgatttgtcccaggtcctcactaccgggcgcaggagggtgagcgttattggtcggcagccttctgggcagaccttgacctcgtgggctagggatgactaaaatatttattttttttaagtatttaggtttttgtttgtttcctttgttcttacctgtatgtctccagtatccactttgcacagctctccggtctctctctctctacaaactcccacttgtcatgtgacaggtaaactatcttggtgaatttttttttcctagccctctcacatttatgaagcaagccccacttattccccattcttcctagttttctcctcccaggaactgggccaactcacctgagtcaccctacctgtgcctgaccctacttcttttgctcttagctgtctgctcagacagaacccctacatgaaacagaaacaaaaacactaaaaataaaaatggccatttgctttttcaccagatttgctaatttatcctgaaatttcagattcccagagcaaaataattttaaacaaaggttgagatgtaaaaggtattaaattgatgttgctggactgtcatagaaattacacccaaagaggtatttatctttacttttaaacagtgagcctgaattttgttgctgttttgatttgtactgaaaaatggtaattgttgctaatcttcttatgcaatttccttttttgttattattacttatttttgacagtgttgaaaatgttcagaaggttgctctagattgagagaagagacaaacacctcccaggagacagttcaagaaagcttcaaactgcatgattcatgccaattagcaattgactgtcactgttccttgtcactggtagaccaaaataaaaccagctctactggtcttgtggaattgggagcttgggaatggatcctggaggatgcccaattagggcctagccttaatcaggtcctcagagaatttctaccatttcagagaggccttttggaatgtggcccctgaacaagaattggaagctgccctgcccatgggagctggttagaaatgcagaatcctaggctccaccccatccagttcatgagaatctatatttaacaagatctgcagggggtgtgtctgctcagtaatttgaggacaaccattccagactgcttccaattttctggaatacatgaaatatagatcagttataagtagcaggccaagtcaggcccttattttcaagaaactgaggaattttctttgtgtagctttgctctttggtagaaaaggctaggtacacagctctagacactgccacacagggtctgcaaggtctttggttcagctaagctaggaatgaaatcctgcttcagtgtatggaaataaatgtatcatagaaatgtaacttttgtaagacaaaggttttcctcttctattttgtaaactcaaaatatttgtacatagttatttatttattggagataatctagaacacaggcaaaatccttgcttatgacatcacttgtacaaaataaacaaataacaatgtgctctcgggttgtgtgtctgttcacttttcctccctcagtgccctcattttatgtcattaaatggggctcacaaaccatgcaaatgctatgagatgcatggagggctgccctgtaccccagcacttgtgttgtctggtggtggcaccatctctgattttcaaagctttttccagaggctattattttcactgtagaatgatttcatgctatctctgtgtgcacaaatatttattttctttctgtaaccataacaacttcatatatgaggacttgtgtctctgtgcttttaaatgcataaatgcattataggatcatttgttggaatgaattaaataaacccttcctggggcatctggcgaatcccaaaaaaaaaaaaaaaaa

SEQ ID NO: 36 - protein, 575 aa, Homo sapiens
MLGVLVLGALALAGLGFPAPAEPQPGGSQCVEHDCFALYPGPATFLNASQICDGLRGHLMTVRSSVAADVISLLLNGDGGVGRRRLWIGLQLPPGCGDPKRLGPLRGFQWVTGDNNTSYSRWARLDLNGAPLCGPLCVAVSAAEATVPSEPIWEEQQCEVKADGFLCEFHFPATCRPLAVEPGAAAAAVSITYGTPFAARGADFQALPVGSSAAVAPLGLQLMCTAPPGAVQGHWAREAPGAWDCSVENGGCEHACNAIPGAPRCQCPAGAALQADGRSCTASATQSCNDLCEHFCVPNPDQPGSYSCMCETGYRLAADQHRCEDVDDCILEPSPCPQRCVNTQGGFECHCYPNYDLVDGECVEPVDPCFRANCEYQCQPLNQTSYLCVCAEGFAPIPHEPHRCQMFCNQTACPADCDPNTQASCECPEGYILDDGFICTDIDECENGGFCSGVCHNLPGTFECICGPDSALARHIGTDCDSGKVDGGDSGSGEPPPSPTPGSTLTPPAVGLVHSGLLIGISIASLCLVVALLALLCHLRKKQGAARAKMEYKCAAPSKEVVLQHVRTERTPQRL

SEQ ID NO: 37 - DNA, 627 bp, Homo sapiens
gcggccgcaagctcggcactcacggctctgagggctccgacggcactgacggccatggcgcgttcgaacctcccgctggcgctgggcctggccctggtcgcattctgcctcctggcgctgccacgcgacgcccgggcccggccgcaggagcgcatggtcggagaactccgggacctgtcgcccgacgacccgcaggtgcagaaggcggcgcaggcggccgtggccagctacaacatgggcagcaacagcatctactacttccgagacacgcacatcatcaaggcgcagagccagctggtggccggcatcaagtacttcctgacgatggagatggggagcacagactgccgcaagaccagggtcactggagaccacgtcgacctcaccacttgccccctggcagcaggggcgcagcaggagaagctgcgctgtgactttgaggtccttgtggttccctggcagaactcctctcagctcctaaagcacaactgtgtgcagatgtgataagtccccgagggcgaaggccattgggtttggggccatggtggagggcacttcaggtccgtgggccgtatctgtcacaataaatggccagtgctgcttcttgcaaaaaaaaaaaaaaaaaaa

SEQ ID NO: 38 - protein, 149 aa, Homo sapiens
MARSNLPLALGLALVAFCLLALPRDARARPQERMVGELRDLSPDDPQVQKAAQAAVASYNMGSNSIYYFRDTHIIKAQSQLVAGIKYFLTMEMGSTDCRKTRVTGDHVDLTTCPLAAGAQQEKLRCDFEVLVVPWQNSSQLLKHNCVQM

SEQ ID NO: 39 - DNA, 8972 bp, Homo sapiens
cagctgccacttttcaccgttagaagtagagctttttccagacctcctaccttttagtctactttgaaaggtgaaagaaagaacatcgtttcaggaataaaaatgcacagtagtagttatagttaccgtagcagtgattctgtgtttagtaacactaccagcactcgaaccagtcttgattcaaatgaaaatcttctcttggttcattgtggtccaacactgatcaactcttgcattagcttcggcagtgaatcctttgatggacacaggttagaaatgttgcaacagattgccaacagagttcagagggacagtgtcatctgtgaagacaaactgattcttgctggaaatgctcttcagtctgattctaaaagattagaatcaggagtgcagtttcagaatgaagcagaaattgctgggtatatacttgaatgtgagaaccttttacgccagcatgtaattgatgtacagattcttattgatggaaaatactaccaggcagatcaattggtacagagggttgcaaaactgcgtgacgaaattatggccttaaggaacgaatgttcttctgtgtacagcaaaggacgcatactgacaacagaacagacaaagctcatgatatcaggaatcactcaaagtttaaactcaggatttgcacagaccttacaccctagtctgacctcagggctgacccagagtttaacaccttccctaacctcttctagtatgacttctggcctgtcatcagggatgacttcccgcctgactccatctgtcactccagcttatacacctggtttcccatcaggattagttccaaatttcagttcaggagtagagccaaattcattgcaaactttgaagttgatgcagatccgaaaaccccttctaaagtcttctttgctggatcaaaatttaacagaagaagaaatcaatatgaaatttgttcaggatcttttgaattgggttgatgagatgcaggtacaactggaccgcactgagtggggctcagatttgccaagtgttgaaagccatttagaaaatcataaaaatgttcatagagctattgaagaatttgaatctagtctcaaagaagctaaaatcagtgagattcaaatgacagcacctcttaaactgacttatgcagaaaagttgcacagattagagagtcagtatgcaaaactcttgaatacatccaggaatcaagaacggcaccttgatacactccataattttgtaagtcgtgcgactaatgaacttatttggttgaatgaaaaagaagaggaggaagttgcttatgactggagtgagagaaacaccaacatagctaggaaaaaagattatcatgctgaattaatgagagaacttgatcaaaaggaagaaaatattaaatcagttcaggagatagcagagcagctacttctagaaaatcatccagcccggttaactattgaggcctacagagcggcaatgcagacgcagtggagctggatcttacagctctgccagtgtgtggagcagcacataaaggagaacacagcgtatttcgagtttttcaatgatgccaaagaagctactgattacttaaggaatctaaaagatgccattcagcggaagtacagctgtgatagatcaagcagcattcacaagctagaagaccttgttcaggaatcaatggaagagaaagaagaacttctgcagtacaaaagcactatagcaaacctaatgggaaaagcaaaaacaataattcaactgaagccaaggaattctgactgtccactcaaaacttctattccgatcaaagctatctgtgactacagacaaattgagataaccatttacaaagacgatgaatgtgttttggcgaataactctcatcgtgctaaatggaaggtcattagtcctactgggaatgaggctatggtcccatctgtgtgcttcaccgttcctccaccaaacaaagaagcggtggaccttgccaacagaattgagcaacagtatcagaatgtcctgactctttggcatgagtctcacataaacatgaagagtgtagtatcctggcattatctcatcaatgaaattgatagaattcgagctagcaatgtggcttcaataaagacaatgctacctggtgaacatcagcaagttctaagtaatctacaatctcgttttgaagattttctggaagatagccaggaatcccaagtcttttcaggctcagatataacacaactggaaaaggaggttaatgtatgtaagcagtattatcaagaacttcttaaatctgcagaaagagaggagcaagaggaatcagtttataatctctacatctctgaagttcgaaacattagacttcggttagagaactgtgaagatcggctgattagacagattcgaactcccctggaaagagatgatttgcatgaaagtgtgttcagaatcacagaacaggagaaactaaagaaagagctggaacgacttaaagatgatttgggaacaatcacaaataagtgtgaggagtttttcagtcaagcagcagcctcttcatcagtccctaccctacgatcagagcttaatgtggtccttcagaacatgaaccaagtctattctatgtcttccacttacatagataagttgaaaactgttaacttggtgttaaaaaacactcaagctgcagaagccctcgtaaaactctatgaaactaaactgtgtgaagaagaagcagttatagctgacaagaataatattgagaatctaataagtactttaaagcaatggagatctgaagtagatgaaaagagacaggtattccatgccttagaggatgagttgcagaaagctaaagccatcagtgatgaaatgtttaaaacgtataaagaacgggaccttgattttgactggcacaaagaaaaagcagatcaattagttgaaaggtggcaaaatgttcatgtgcagattgacaacaggttacgggacttagagggcattggcaaatcactgaagtactacagagacacttaccatcctttagatgattggatccagcaggttgaaactactcagagaaagattcaggaaaatcagcctgaaaatagtaaaaccctagccacacagttgaatcaacagaagatgctggtgtccgaaatagaaatgaaacagagcaaaatggacgagtgtcaaaaatatgcagaacagtactcagctacagtgaaggactatgaattacaaacaatgacctaccgggccatggtagattcacaacaaaaatctccagtgaaacgccgaagaatgcagagttcagcagatctcattattcaagagttcatggacctaaggactcgatatactgccctggtcactctcatgacacaatatattaaatttgctggtgattcattgaagaggctggaagaggaggagattaaaaggtgtaaggagacttctgaacatggggcatattcagatctgcttcagcgtcagaaggcaacagtgcttgagaatagcaaacttacaggaaagataagtgagttggaaagaatggtagctgaactaaagaaacaaaagtcccgagtagaggaagaacttccgaaggtcagggaggctgcagaaaatgaattgagaaagcagcagagaaatgtagaagatatctctctgcagaagataagggctgaaagtgaagccaagcagtaccgcagggaacttgaaaccattgtgagagagaaggaagccgctgaaagagaactggagcgggtgaggcagctcaccatagaggccgaggctaaaagagctgccgtggaagagaacctcctgaattttcgcaatcagttggaggaaaacacctttaccagacgaacactggaagatcatcttaaaagaaaagatttaagtctcaatgatttggagcaacaaaaaaataaattaatggaagaattaagaagaaagagagacaatgaggaagaactcttgaagctgataaagcagatggaaaaagaccttgcatttcagaaacaggtagcagagaaacagttgaaagaaaagcagaaaattgaattggaagcaagaagaaaaataactgaaattcagtatacatgtagagaaaatgcattgccagtgtgtccgatcacacaggctacatcatgcagggcagtaacgggtctccagcaagaacatgacaagcagaaagcagaagaactcaaacagcaggtagatgaactaacagctgccaatagaaaggctgaacaagacatgagagagctgacatatgaacttaatgccctccagcttgaaaaaacgtcatctgaggaaaaggctcgtttgctaaaagataaactagatgaaacaaataatacactcagatgccttaagttggagctggaaaggaaggatcaggcggagaaagggtattctcaacaactcagagagcttggtaggcaattgaatcaaaccacaggtaaagctgaagaagccatgcaagaagctagtgatctcaagaaaataaagcgcaattatcagttagaattagaatctcttaatcatgaaaaagggaaactacaaagagaagtagacagaatcacaagggcacatgctgtagctgagaagaatattcagcatttaaattcacaaattcattcttttcgagatgagaaagaattagaaagactacaaatctgccagagaaaatcagatcatctaaaagaacaatttgagaaaagccatgagcagttgcttcaaaatatcaaagctgaaaaagaaaataatgataaaatccaaaggctcaatgaagaattggagaaaagtaatgagtgtgcagagatgctaaaacaaaaagtagaggagcttactaggcagaataatgaaaccaaattaatgatgcagagaattcaggcagaatcagagaatatagttttagagaaacaaactatccagcaaagatgtgaagcactgaaaattcaggcagatggttttaaagatcagctacgcagcacaaatgaacacttgcataaacagacaaaaacagagcaggattttcaaagaaaaattaaatgcctagaagaagacctggcgaaaagtcaaaatttggtaagtgaatttaagcaaaagtgtgaccaacagaacattatcatccagaataccaagaaagaagttagaaatctgaatgcggaactgaatgcttccaaagaagagaagcgacgcggggagcagaaagttcagctacaacaagctcaggtgcaagagttaaataacaggttgaaaaaagtacaagacgaattacacttaaagaccatagaggagcagatgacccacagaaagatggttctgtttcaggaagaatctggtaaattcaaacaatcagcagaggagtttcggaagaagatggaaaaattaatggagtccaaagtcatcactgaaaatgatatttcaggcattaggcttgactttgtgtctcttcaacaagaaaactctagagcccaagaaaatgctaagctttgtgaaacaaacattaaagaacttgaaagacagcttcaacagtatcgtgaacaaatgcagcaagggcagcacatggaagcaaatcattaccaaaaatgtcagaaacttgaggatgagctgatagcccagaagcgtgaggttgaaaacctgaagcaaaaaatggaccaacagatcaaagagcatgaacatcaattagttttgctccagtgtgaaattcaaaaaaagagcacagccaaagactgtaccttcaaaccagattttgagatgacagtgaaggagtgccagcactctggagagctgtcctctagaaacactggacaccttcacccaacacccagatcccctctgttgagatggactcaagaaccacagccattggaagagaagtggcagcatcgggttgttgaacagatacccaaagaagtccaattccagccaccaggggctccactcgagaaagagaaaagccagcagtgttactctgagtacttttctcagacaagcaccgagttacagataacttttgatgagacaaaccccattacaagactgtctgaaattgagaagataagagaccaagccctgaacaattctagaccacctgttaggtatcaagataacgcatgtgaaatggaactggtgaaggttttgacacccttagagatagctaagaacaagcagtatgatatgcatacagaagtcacaacattaaaacaagaaaagaacccagttcccagtgctgaagaatggatgcttgaagggtgcagagcatctggtggactcaagaaaggggatttccttaagaagggcttagaaccagagaccttccagaactttgatggtgatcatgcatgttcagtcagggatgatgaatttaaattccaagggcttaggcacactgtgactgccaggcagttggtggaagctaagcttctggacatgagaacaattgagcagctgcgactcggtcttaagactgttgaagaagttcagaaaactcttaacaagtttctgacgaaagccacctcaattgcagggctttacctagaatctacaaaagaaaagatttcatttgcctcagcggccgagagaatcataatagacaaaatggtggctttggcatttttagaagctcaggctgcaacaggttttataattgatcccatttcaggtcagacatattctgttgaagatgcagttcttaaaggagttgttgaccccgaattcagaattaggcttcttgaggcagagaaggcagctgtgggatattcttattcttctaagacattgtcagtgtttcaagctatggaaaatagaatgcttgacagacaaaaaggtaaacatatcttggaagcccagattgccagtgggggtgtcattgaccctgtgagaggcattcgtgttcctccagaaattgctctgcagcaggggttgttgaataatgccatcttacagtttttacatgagccatccagcaacacaagagttttccctaatcccaataacaagcaagctctgtattactcagaattactgcgaatgtgtgtatttgatgtagagtcccaatgctttctgtttccatttggggagaggaacatttccaatctcaatgtcaagaaaacacatagaatttctgtagtagatactaaaacaggatcagaattgaccgtgtatgaggctttccagagaaacctgattgagaaaagtatatatcttgaactttcagggcagcaatatcagtggaaggaagctatgttttttgaatcctatgggcattcttctcatatgctgactgatactaaaacaggattacacttcaatattaatgaggctatagagcagggaacaattgacaaagccttggtcaaaaagtatcaggaaggcctcatcacacttacagaacttgctgattctttgctgagccggttagtccccaagaaagatttgcacagtcctgttgcagggtattggctgactgctagtggggaaaggatctctgtactaaaagcctcccgtagaaatttggttgatcggattactgccctccgatgccttgaagcccaagtcagtacagggggcataattgatcctcttactggcaaaaagtaccgggtggccgaagctttgcatagaggcctggttgatgaggggtttgcccagcagctgcgacagtgtgaattagtaatcacagggattggccatcccatcactaacaaaatgatgtcagtggtggaagctgtgaatgcaaatattataaataaggaaatgggaatccgatgtttggaatttcagtacttgacaggagggttgatagagccacaggttcactctcggttatcaatagaagaggctctccaagtaggtattatagatgtcctcattgccacaaaactcaaagatcaaaagtcatatgtcagaaatataatatgccctcagacaaaaagaaagttgacatataaagaagccttagaaaaagctgattttgatttccacacaggacttaaactgttagaagtatctgagcccctgatgacaggaatttctagcctctactattcttcctaatgggacatgtttaaataactgtgcaaggggtgatgcaggctggttcatgccactttttcagagtatgatgatatcggctacatatgcagtctgtgaattatgtaacatactctatttcttgagggctgcaaattgctaagtgctcaaaatagagtaagttttaaattgaaaattacataagatttaatgcccttcaaatggtttcatttagccttgagaatggttttttgaaacttggccacactaaaatgtttttttttttacgtagaatgtgggataaacttgatgaactccaagttcacagtgtcatttcttcagaactccccttcattgaatagtgatcatttattaaatgataaattgcactcgctgaaagagcacgtcatgaagcaccatggaatcaaagagaaagatataaattcgttcccacagccttcaagctgcagtgttttagattgcttcaaaaaatgaaaaagttttgcctttttctgtatatagtgaccttctttgcatattaaaatgtttaccacaatgtcccatttctagttaagtcttcgcacttgaaagctaacattatgaatattatgtgttggaggaggggaaggattttcttcattctgtgtattttccttacatgtacagtagacgttctctattctatcagccttctatggtacctttttgtcaggacaattaggattgtaatgctaatgcaaaggcagcaattcaaagatcttctagtgcctcatgaataaagttgagatttaaaatttgtaacattgatggaacagctgggaggttagaccaatcattaaggaatgtatgccatagctttctttgctaccataaacattttggaggtgcatctgctatgtgacatggtaaatatggttaagtgaatgaataaaatgttttagtaa

SEQ ID NO: 40 - protein, 2649 aa, Homo sapiens
MHSSSYSYRSSDSVFSNTTSTRTSLDSNENLLLVHCGPTLINSCISFGSESFDGHRLEMLQQIANRVQRDSVICEDKLILAGNALQSDSKRLESGVQFQNEAEIAGYILECENLLRQHVIDVQILIDGKYYQADQLVQRVAKLRDEIMALRNECSSVYSKGRILTTEQTKLMISGITQSLNSGFAQTLHPSLTSGLTQSLTPSLTSSSMTSGLSSGMTSRLTPSVTPAYTPGFPSGLVPNFSSGVEPNSLQTLKLMQIRKPLLKSSLLDQNLTEEEINMKFVQDLLNWVDEMQVQLDRTEWGSDLPSVESHLENHKNVHRAIEEFESSLKEAKISEIQMTAPLKLTYAEKLHRLESQYAKLLNTSRNQERHLDTLHNFVSRATNELIWLNEKEEEEVAYDWSERNTNIARKKDYHAELMRELDQKEENIKSVQEIAEQLLLENHPARLTIEAYRAAMQTQWSWILQLCQCVEQHIKENTAYFEFFNDAKEATDYLRNLKDAIQRKYSCDRSSSIHKLEDLVQESMEEKEELLQYKSTIANLMGKAKTIIQLKPRNSDCPLKTSIPIKAICDYRQIEITIYKDDECVLANNSHRAKWKVISPTGNEAMVPSVCFTVPPPNKEAVDLANRIEQQYQNVLTLWHESHINMKSVVSWHYLINEIDRIRASNVASIKTMLPGEHQQVLSNLQSRFEDFLEDSQESQVFSGSDITQLEKEVNVCKQYYQELLKSAEREEQEESVYNLYISEVRNIRLRLENCEDRLIRQIRTPLERDDLHESVFRITEQEKLKKELERLKDDLGTITNKCEEFFSQAAASSSVPTLRSELNVVLQNMNQVYSMSSTYIDKLKTVNLVLKNTQAAEALVKLYETKLCEEEAVIADKNNIENLISTLKQWRSEVDEKRQVFHALEDELQKAKAISDEMFKTYKERDLDFDWHKEKADQLVERWQNVHVQIDNRLRDLEGIGKSLKYYRDTYHPLDDWIQQVETTQRKIQENQPENSKTLATQLNQQKMLVSEIEMKQSKMDECQKYAEQYSATVKDYELQTMTYRAMVDSQQKSPVKRRRMQSSADLIIQEFMDLRTRYTALVTLMTQYIKFAGDSLKRLEEEEIKRCKETSEHGAYSDLLQRQKATVLENSKLTGKISELERMVAELKKQKSRVEEELPKVREAAENELRKQQRNVEDISLQKIRAESEAKQYRRELETIVREKEAAERELERVRQLTIEAEAKRAAVEENLLNFRNQLEENTFTRRTLEDHLKRKDLSLNDLEQQKNKLMEELRRKRDNEEELLKLIKQMEKDLAFQKQVAEKQLKEKQKIELEARRKITEIQYTCRENALPVCPITQATSCRAVTGLQQEHDKQKAEELKQQVDELTAANRKAEQDMRELTYELNALQLEKTSSEEKARLLKDKLDETNNTLRCLKLELERKDQAEKGYSQQLRELGRQLNQTTGKAEEAMQEASDLKKIKRNYQLELESLNHEKGKLQREVDRITRAHAVAEKNIQHLNSQIHSFRDEKELERLQICQRKSDHLKEQFEKSHEQLLQNIKAEKENNDKIQRLNEELEKSNECAEMLKQKVEELTRQNNETKLMMQRIQAESENIVLEKQTIQQRCEALKIQADGFKDQLRSTNEHLHKQTKTEQDFQRKIKCLEEDLAKSQNLVSEFKQKCDQQNIIIQNTKKEVRNLNAELNASKEEKRRGEQKVQLQQAQVQELNNRLKKVQDELHLKTIEEQMTHRKMVLFQEESGKFKQSAEEFRKKMEKLMESKVITENDISGIRLDFVSLQQENSRAQENAKLCETNIKELERQLQQYREQMQQGQHMEANHYQKCQKLEDELIAQKREVENLKQKMDQQIKEHEHQLVLLQCEIQKKSTAKDCTFKPDFEMTVKECQHSGELSSRNTGHLHPTPRSPLLRWTQEPQPLEEKWQHRVVEQIPKEVQFQPPGAPLEKEKSQQCYSEYFSQTSTELQITFDETNPITRLSEIEKIRDQALNNSRPPVRYQDNACEMELVKVLTPLEIAKNKQYDMHTEVTTLKQEKNPVPSAEEWMLEGCRASGGLKKGDFLKKGLEPETFQNFDGDHACSVRDDEFKFQGLRHTVTARQLVEAKLLDMRTIEQLRLGLKTVEEVQKTLNKFLTKATSIAGLYLESTKEKISFASAAERIIIDKMVALAFLEAQAATGFIIDPISGQTYSVEDAVLKGVVDPEFRIRLLEAEKAAVGYSYSSKTLSVFQAMENRMLDRQKGKHILEAQIASGGVIDPVRGIRVPPEIALQQGLLNNAILQFLHEPSSNTRVFPNPNNKQALYYSELLRMCVFDVESQCFLFPFGERNISNLNVKKTHRISVVDTKTGSELTVYEAFQRNLIEKSIYLELSGQQYQWKEAMFFESYGHSSHMLTDTKTGLHFNINEAIEQGTIDKALVKKYQEGLITLTELADSLLSRLVPKKDLHSPVAGYWLTASGERISVLKASRRNLVDRITALRCLEAQVSTGGIIDPLTGKKYRVAEALHRGLVDEGFAQQLRQCELVITGIGHPITNKMMSVVEAVNANIINKEMGIRCLEFQYLTGGLIEPQVHSRLSIEEALQVGIIDVLIATKLKDQKSYVRNIICPQTKRKLTYKEALEKADFDFHTGLKLLEVSEPLMTGISSLYYSS

SEQ ID NO: 41 - DNA, 3332 bp, Homo sapiens
ctccctccaggaaggccgttgtcttccctgggacgacttgccagctctgaggcatgacagtacgggcccccagaagggtgaccaggaggccctcctcgtcccagctgccggcgtcgccgcccactgcagggcccgggctgtgactcgtggggacggttccctgcgccccggcgggggaggtgggcggggaggggcggcggggcgccggggcggggctcgggacggccgggctgggagctggagcccacagcgggaagcggccgccgcccgggcctcgcagggctaggcgaggcgagggggggcggggccgggcgctacgggaaggggaggccgcgcggaccgggagccgcaccgcgccagccgggctgcagcggccgcgcaccaaggctgcgatggggctggagacggagaaggcggacgtacagctcttcatggacgacgactcctacagccaccacagcggcctcgagtacgccgaccccgagaagttcgcggactcggaccaggaccgggatccccaccggctcaactcgcatctcaagctgggcttcgaggatgtgatcgcagagccggtgactacgcactcctttgacaaagtgtggatctgcagccatgccctctttgaaatcagcaaatacgtaatgtacaagttcctgacggtgttcctggccattcccctggccttcattgcgggaattctctttgccaccctcagctgtctgcacatctggattttaatgccttttgtaaagacctgcctaatggttctgccttcagtgcagacaatatggaagagtgtgacagatgttatcattgctccattgtgtacgagcgtaggacgatgcttctcttctgtcagcctgcaactgagccaggattgaatacttggaccccaggtctggagattgggatactgtaatacttctttgttattataacataaaagcaccactgttctgttcatttcctagctgttctaattaagaaaactattaagatgagcaaccacatttagaaatgtttattgacaggtcttttcaaataatgcttttctaattaatagccaaagatttcatatctaactttgtaaccagaattatacagtaagttgacaccacttagatttaaaggcagacagttttgctttagtacaatagtatacattttataatgatgaacttataatgattaagggacatttctataaaaatactacaatagttttatgcacaacttcccattaaaaatgagatttcttatttgtttgtctgtttttactctgggagtaatactttttaaattacctttacatatatagtcactggcatactgagaatatacaatgatcctggaaattgcagtaacaaaagcacacaacgattatagtaactataagatacaataaaacaaataaatatgaaagtagattcatgaaaatgtattcctttaaaatattgttttcctacaggcctatttaacaagatgtttcattttactgtatattttgtagttaatataaatgttgctctaatcagattgcttaaaagcatttttattatatttatgttgttgaactaatatatgaaataagtaaatgtagctcccacaaggtaaacttcattggtaagattgcactgttctgattatgtaagcatttgtacatcttctttggaaataaaagataaaagagcgatacacaaagctttcttttctaacttttccaagcaaaatctaaaatgttttatgacatttttctggctgtgatcttaaaataattcatatctaaatagtattttgtctaggagatgctttctctctagtagttagaaattaaatctgtgtcagcattcctattaatgtctcactttactttcaagtaatattggtgctatttaacattttacagtaaatgttacttctgatactttagtacaatttcaactacagtgattcatgtagagagacaggggagttgtcaacttgggctactgaactacatgcataaactaaaaactaacagctacaaacttttaagatttctctaatattggtatgtaacacaggataaagttattcttgtcattttgaactgtagagtcctatttcagtgtgatgaatcactgttgctttgaaaaatctcattatttctgggccgggcatggtggctcacccctgtaatcccagcactttgggaggccaaggcgggtggatcatgaggtcaggagatcaagaccatcctggccaacatggtgataccccgtctctactaaaaatacaaaaaaattagttgggcatggtggcatgcacctgtagtcccagctacctgggaggctgaggcaggagaattgcttgaacctgggaggcagaggttgcagtgagccaaaatcatgccactgcactcccgcctggcaacagagcaagagtctgtctcaaaaaaaaaaagaaaaaaagaaaaaaagaaaaaagaaaaatctcattatttcaaaatgatagacatataccaaaaacaagtctataatgtgagtagttactaaaatttacacatcttaaaagtgtgtaaatgcttaaatttcagaattaccatcagaacctcaattgacattcctttgaatacgctaataagtgacaaataagattaataagatttttcaaaatcgccaggactggtgaatataaatgatgattgaactggaataatattggggaccaaatcaaatgaatgattaaattatgaagctcatatccttttgaaggtagttgcaaagagacatttcaaaactgccctaggccattgcagcatccttagatgggacgcataatcattaccttaaagcatcaccactcattttgaccatatagattttattatgttagtttaaaaggtcaatcagcctcatgactttatagttatgtcttgtatttaaaaacattttttatacatttggttatgttgataaaccaaaaacatttgattaataaaatatctatttgaataaattatgagctatcctttcaaacagctattggcaagttttaaacccaaaatatatacacatagttctgtaataaaactgtttgacttctcaagtaacatgacttccttatttctgaacagtactggttactttcaaaatgaatttttattgagattttccattaactatttttttcaaagactcaaattttgtaccaagtaaatccaggctttatgtacaaacatgttgtttgttttatttggggctgggggaggtatatgatgagcagacttctcggaattcataataaattttctaaaagcctaaaaaaaaaaaaaaaaaaaaaaaaaaaaaaaa

SEQ ID NO: 42 - protein, 162 aa, Homo sapiens
MGLETEKADVQLFMDDDSYSHHSGLEYADPEKFADSDQDRDPHRLNSHLKLGFEDVIAEPVTTHSFDKVWICSHALFEISKYVMYKFLTVFLAIPLAFIAGILFATLSCLHIWILMPFVKTCLMVLPSVQTIWKSVTDVIIAPLCTSVGRCFSSVSLQLSQD

SEQ ID NO: 43 - DNA, 840 bp, Homo sapiens
actcgccacctcctcttccacccctgccaggcccagcagccaccacagcgcctgcttcctcggccctgaaatcatgcccctaggtctcctgtggctgggcctagccctgttgggggctctgcatgcccaggcccaggactccacctcagacctgatcccagccccacctctgagcaaggtccctctgcagcagaacttccaggacaaccaattccaggggaagtggtatgtggtaggcctggcagggaatgcaattctcagagaagacaaagacccgcaaaagatgtatgccaccatctatgagctgaaagaagacaagagctacaatgtcacctccgtcctgtttaggaaaaagaagtgtgactactggatcaggacttttgttccaggttgccagcccggcgagttcacgctgggcaacattaagagttaccctggattaacgagttacctcgtccgagtggtgagcaccaactacaaccagcatgctatggtgttcttcaagaaagtttctcaaaacagggagtacttcaagatcaccctctacgggagaaccaaggagctgacttcggaactaaaggagaacttcatccgcttctccaaatctctgggcctccctgaaaaccacatcgtcttccctgtcccaatcgaccagtgtatcgacggctgagtgcacaggtgccgccagctgccgcaccagcccgaacaccattgagggagctgggagaccctccccacagtgccacccatgcagctgctccccaggccaccccgctgatggagccccaccttgtctgctaaataaacatgtgccctcaggccaaaaaaaaaaaaaaaaaa

SEQ ID NO: 44 - protein, 198 aa, Homo sapiens
MPLGLLWLGLALLGALHAQAQDSTSDLIPAPPLSKVPLQQNFQDNQFQGKWYVVGLAGNAILREDKDPQKMYATIYELKEDKSYNVTSVLFRKKKCDYWIRTFVPGCQPGEFTLGNIKSYPGLTSYLVRVVSTNYNQHAMVFFKKVSQNREYFKITLYGRTKELTSELKENFIRFSKSLGLPENHIVFPVPIDQCIDG

SEQ ID NO: 45 - DNA, 813 bp, Homo sapiens
acccgcgcctgaccgcggcagctcccaccatggcggagaccaagctccagctgtttgtcaaggcgagtgaggacggggagagcgtgggtcactgcccctcctgccagcggctcttcatggtcctgctcctcaagggcgtacctttcaccctcaccacggtggacacgcgcaggtccccggacgtgctgaaggacttcgcccccggctcgcagctgcccatcctgctctatgacagcgacgccaagacagacacgctgcagatcgaggactttctggaggagacgctggggccgcccgacttccccagcctggcgcctcgttacagggagtccaacaccgccggcaacgacgttttccacaagttctccgcgttcatcaagaacccggtgcccgcgcaggacgaagccctgtaccagcagctgctgcgcgccctcgccaggctggacagctacctgcgcgcgcccctggagcacgagctggcgggggagccgcagctgcgcgagtcccgccgccgcttcctggacggcgacaggctcacgctggccgactgcagcctcctgcccaagctgcacatcgtcgacacggtgtgcgcgcacttccgccaggcgcccatccccgcggagctgcgcggcgtacgccgctacctggacagcgcgatgcaggagaaagagttcaaatacacgtgtccgcacagcgccgagatcctggcggcctaccggcccgccgtgcacccccgctagcgccccaccccgcgtctgtcgcccaataaaggcatctttgtcgggagtgagggtgtcctgacatctgaagggc

SEQ ID NO: 46 - protein, 236 aa, Homo sapiens
MAETKLQLFVKASEDGESVGHCPSCQRLFMVLLLKGVPFTLTTVDTRRSPDVLKDFAPGSQLPILLYDSDAKTDTLQIEDFLEETLGPPDFPSLAPRYRESNTAGNDVFHKFSAFIKNPVPAQDEALYQQLLRALARLDSYLRAPLEHELAGEPQLRESRRRFLDGDRLTLADCSLLPKLHIVDTVCAHFRQAPIPAELRGVRRYLDSAMQEKEFKYTCPHSAEILAAYRPAVHPR

SEQ ID NO: 47 - DNA, 1695 bp, Homo sapiens
caagcaggatacgtttttctgttgggcattgactagattgtttgcaaaagtttcgcatcaaaaacaaacaacaacaacaaaaaaccaaacaactctccttgatctatactttgagaattgttgatttctttttttttattctgacttttaaaaacaacttttttttccacttttttaaaaaatgcactactgtgtgctgagcgcttttctgatcctgcatctggtcacggtcgcgctcagcctgtctacctgcagcacactcgatatggaccagttcatgcgcaagaggatcgaggcgatccgcgggcagatcctgagcaagctgaagctcaccagtcccccagaagactatcctgagcccgaggaagtccccccggaggtgatttccatctacaacagcaccagggacttgctccaggagaaggcgagccggagggcggccgcctgcgagcgcgagaggagcgacgaagagtactacgccaaggaggtttacaaaatagacatgccgcccttcttcccctccgaaaatgccatcccgcccactttctacagaccctacttcagaattgttcgatttgacgtctcagcaatggagaagaatgcttccaatttggtgaaagcagagttcagagtctttcgtttgcagaacccaaaagccagagtgcctgaacaacggattgagctatatcagattctcaagtccaaagatttaacatctccaacccagcgctacatcgacagcaaagttgtgaaaacaagagcagaaggcgaatggctctccttcgatgtaactgatgctgttcatgaatggcttcaccataaagacaggaacctgggatttaaaataagcttacactgtccctgctgcacttttgtaccatctaataattacatcatcccaaataaaagtgaagaactagaagcaagatttgcaggtattgatggcacctccacatataccagtggtgatcagaaaactataaagtccactaggaaaaaaaacagtgggaagaccccacatctcctgctaatgttattgccctcctacagacttgagtcacaacagaccaaccggcggaagaagcgtgctttggatgcggcctattgctttagaaatgtgcaggataattgctgcctacgtccactttacattgatttcaagagggatctagggtggaaatggatacacgaacccaaagggtacaatgccaacttctgtgctggagcatgcccgtatttatggagttcagacactcagcacagcagggtcctgagcttatataataccataaatccagaagcatctgcttctccttgctgcgtgtcccaagatttagaacctctaaccattctctactacattggcaaaacacccaagattgaacagctttctaatatgattgtaaagtcttgcaaatgcagctaaaattcttggaaaagtggcaagaccaaaatgacaatgatgatgataatgatgatgacgacgacaacgatgatgcttgtaacaagaaaacataagagagccttggttcatcagtgttaaaaaatttttgaaaaggcggtactagttcagacactttggaagtttgtgttctgtttgttaaaactggcatctgacacaaaaaaagttgaaggccttattctacatttcacctactttgtaagtgagagagacaagaagcaaatttttttaaa

SEQ ID NO: 48 - protein, 414 aa, Homo sapiens
MHYCVLSAFLILHLVTVALSLSTCSTLDMDQFMRKRIEAIRGQILSKLKLTSPPEDYPEPEEVPPEVISIYNSTRDLLQEKASRRAAACERERSDEEYYAKEVYKIDMPPFFPSENAIPPTFYRPYFRIVRFDVSAMEKNASNLVKAEFRVFRLQNPKARVPEQRIELYQILKSKDLTSPTQRYIDSKVVKTRAEGEWLSFDVTDAVHEWLHHKDRNLGFKISLHCPCCTFVPSNNYIIPNKSEELEARFAGIDGTSTYTSGDQKTIKSTRKKNSGKTPHLLLMLLPSYRLESQQTNRRKKRALDAAYCFRNVQDNCCLRPLYIDFKRDLGWKWIHEPKGYNANFCAGACPYLWSSDTQHSRVLSLYNTINPEASASPCCVSQDLEPLTILYYIGKTPKIEQLSNMIVKSCKCS

SEQ ID NO: 49 - DNA, 2070 bp, Homo sapiens
caggagatgcccaaagccaggcagagcccgggggcgaggggacggcaggcaggtgtggcgctgccctgggcgggcttgcacccccacacccaagtgagcggcctgctcactcctcagctgcaggagccagacgtgtggagtcccagcagaggccaacctgtgtctcttcatctccctgggaaaggtgcccccgaggtgaaagagatggcctggtggaaatcctggattgaacaggagggtgtcacagtgaagagcagctcccacttcaacccagaccctgatgcagagaccctctacaaagccatgaaggggatcgggaccaacgagcaggctatcatcgatgtgctcaccaagagaagcaacacgcagcggcagcagatcgccaagtccttcaaggctcagttcggcaaggacctcactgagaccttgaagtctgagctcagtggcaagtttgagaggctcattgtggcccttatgtacccgccatacagatacgaagccaaggagctgcatgacgccatgaagggcttaggaaccaaggagggtgtcatcattgagatcctggcctctcggaccaagaaccagctgcgggagataatgaaggcgtatgaggaagactatgggtccagcctggaggaggacatccaagcagacacaagtggctacctggagaggatcctggtgtgcctcctgcagggcagcagggatgatgtgagcagctttgtggacccaggactggccctccaagacgcacaggatctgtatgcggcaggcgagaagattcgtgggactgatgagatgaaattcatcaccatcctgtgcacgcgcagtgccactcacctgctgagagtgtttgaagagtatgagaaaattgccaacaagagcattgaggacagcatcaagagtgagacccatggctcactggaggaggccatgctcactgtggtgaaatgcacccaaaacctccacagctactttgcagagagactctactatgccatgaagggagcagggacgcgtgatgggaccctgataagaaacatcgtttcaaggagcgagattgacttaaatcttatcaaatgtcacttcaagaagatgtacggcaagaccctcagcagcatgatcatggaagacaccagcggtgactacaagaacgccctgctgagcctggtgggcagcgacccctgaggcacagaagaacaagagcaaagaccatgaagccagagtctccaggactcctcactcaacctcggccatggacgcaggttgggtgtgaggggggtcccagcctttcggtcttctatttccctatttccagtgctttccagccgggtttctgacccagagggtggaaccggcctggactcctcttcccaacttcctccaggtcatttcccagtgtgagcacaatgccaaccttagtgtttctccagccagacagatgcctcagcatgaagggcttggggacttgtggatcattccttcctccctgcaggagcttcccaagctggtcacagagtctcctgggcacaggttatacagaccccagccccattcccatctactgaaacagggtctccacaagaggggccagggaatatgggtttttaacaagcgtcttacaaaacacttctctatcatgcagccggagagctggctgggagcccttttgttttagaacacacatccttcagcagctgagaaacgaacacgaatccatcccaaccgagatgccattaacattcatctaaaaatgttaggctctaaatggacgaaaaattctctcgccatcttaataacaaaataaactacaaattcctgacccaaggacactgtgttataagaggcgtgggctcccctggtggctgaccaggtcagctgccctggccttgcacccctctgcatgcagcacagaagggtgtgaccatgccctcagcaccactcttgtccccactgaacggcaactgagactgggtacctggagattctgaagtgcctttgctgtggttttcaaaataataaagatttgtattcaactcaaaaaaaaaaaaaaaaaaaaaaaaaaaaaaa

SEQ ID NO: 50 - protein, 327 aa, Homo sapiens
MAWWKSWIEQEGVTVKSSSHFNPDPDAETLYKAMKGIGTNEQAIIDVLTKRSNTQRQQIAKSFKAQFGKDLTETLKSELSGKFERLIVALMYPPYRYEAKELHDAMKGLGTKEGVIIEILASRTKNQLREIMKAYEEDYGSSLEEDIQADTSGYLERILVCLLQGSRDDVSSFVDPGLALQDAQDLYAAGEKIRGTDEMKFITILCTRSATHLLRVFEEYEKIANKSIEDSIKSETHGSLEEAMLTVVKCTQNLHSYFAERLYYAMKGAGTRDGTLIRNIVSRSEIDLNLIKCHFKKMYGKTLSSMIMEDTSGDYKNALLSLVGSDP

SEQ ID NO: 51 - DNA, 1690 bp, Homo sapiens
gtaactgaaaatccacaagacagaatagccagatctcagaggagcctggctaagcaaaaccctgcagaacggctgcctaatttacagcaaccatgagtacaaatggtgatgatcatcaggtcaaggatagtctggagcaattgagatgtcactttacatgggagttatccattgatgacgatgaaatgcctgatttagaaaacagagtcttggatcagattgaattcctagacaccaaatacagtgtgggaatacacaacctactagcctatgtgaaacacctgaaaggccagaatgaggaagccctgaagagcttaaaagaagctgaaaacttaatgcaggaagaacatgacaaccaagcaaatgtgaggagtctggtgacctggggcaactttgcctggatgtattaccacatgggcagactggcagaagcccagacttacctggacaaggtggagaacatttgcaagaagctttcaaatcccttccgctatagaatggagtgtccagaaatagactgtgaggaaggatgggccttgctgaagtgtggaggaaagaattatgaacgggccaaggcctgctttgaaaaggtgcttgaagtggaccctgaaaaccctgaatccagcgctgggtatgcgatctctgcctatcgcctggatggctttaaattagccacaaaaaatcacaagccattttctttgcttcccctaaggcaggctgtccgcttaaatccagacaatggatatattaaggttctccttgccctgaagcttcaggatgaaggacaggaagctgaaggagaaaagtacattgaagaagctctagccaacatgtcctcacagacctatgtctttcgatatgcagccaagttttaccgaagaaaaggctctgtggataaagctcttgagttattaaaaaaggccttgcaggaaacacccacttctgtcttactgcatcaccagatagggctttgctacaaggcacaaatgatccaaatcaaggaggctacaaaagggcagcctagagggcagaacagagaaaagctagacaaaatgataagatcagccatatttcattttgaatctgcagtggaaaaaaagcccacatttgaggtggctcatctagacctggcaagaatgtatatagaagcaggcaatcacagaaaagctgaagagaattttcaaaaattgttatgcatgaaaccagtggtagaagaaacaatgcaagacatacatttccactatggtcggtttcaggaatttcaaaagaaatctgacgtcaatgcaattatccattatttaaaagctataaaaatagaacaggcatcattaacaagggataaaagtatcaattctttgaagaaattggttttaaggaaacttcggagaaaggcattagatctggaaagcttgagcctccttgggttcgtctacaaattggaaggaaatatgaatgaagccctggagtactatgagcgggccctgagactggctgctgactttgagaactctgtgagacaaggtccttaggcacccagatatcagccactttcacatttcatttcattttatgctaacatttactaatcatcttttctgcttactgttttcagaaacattataattcactgtaatgatgtaattcttgaataataaatctgacaaaaaaaaaaaaaaaaaaaaaaaaaaaa

SEQ ID NO: 52 - protein, 478 aa, Homo sapiens
MSTNGDDHQVKDSLEQLRCHFTWELSIDDDEMPDLENRVLDQIEFLDTKYSVGIHNLLAYVKHLKGQNEEALKSLKEAENLMQEEHDNQANVRSLVTWGNFAWMYYHMGRLAEAQTYLDKVENICKKLSNPFRYRMECPEIDCEEGWALLKCGGKNYERAKACFEKVLEVDPENPESSAGYAISAYRLDGFKLATKNHKPFSLLPLRQAVRLNPDNGYIKVLLALKLQDEGQEAEGEKYIEEALANMSSQTYVFRYAAKFYRRKGSVDKALELLKKALQETPTSVLLHHQIGLCYKAQMIQIKEATKGQPRGQNREKLDKMIRSAIFHFESAVEKKPTFEVAHLDLARMYIEAGNHRKAEENFQKLLCMKPVVEETMQDIHFHYGRFQEFQKKSDVNAIIHYLKAIKIEQASLTRDKSINSLKKLVLRKLRRKALDLESLSLLGFVYKLEGNMNEALEYYERALRLAADFENSVRQGP

SEQ ID NO: 53 - DNA, 1881 bp, Homo sapiens
cctgcatctttttggaaggattctttttataaatcagaaagtgttcgaggttcaaaggtttgcctcggagcgtgtgaacattcctccgctcggttttcaactcgcctccaacctgcgccgcccggccagcatgtctccccgcccgtgaagcggggctgccgcctccctgccgctccggctgccactaacgacccgccctcgccgccacctggccctcctgatcgacgacacacgcacttgaaacttgttctcagggtgtgtggaatcaactttccggaagcaaccagcccaccagaggaggtcccgagcgcgagcggagacgatgcagcggagactggttcagcagtggagcgtcgcggtgttcctgctgagctacgcggtgccctcctgcgggcgctcggtggagggtctcagccgccgcctcaaaagagctgtgtctgaacatcagctcctccatgacaaggggaagtccatccaagatttacggcgacgattcttccttcaccatctgatcgcagaaatccacacagctgaaatcagagctacctcggaggtgtcccctaactccaagccctctcccaacacaaagaaccaccccgtccgatttgggtctgatgatgagggcagatacctaactcaggaaactaacaaggtggagacgtacaaagagcagccgctcaagacacctgggaagaaaaagaaaggcaagcccgggaaacgcaaggagcaggaaaagaaaaaacggcgaactcgctctgcctggttagactctggagtgactgggagtgggctagaaggggaccacctgtctgacacctccacaacgtcgctggagctcgattcacggtaacaggcttctctggcccgtagcctcagcggggtgctctcagctgggttttggagcctcccttctgccttggcttggacaaacctagaattttctccctttatgtatctctatcgattgtgtagcaattgacagagaataactcagaatattgtctgccttaaagcagtacccccctaccacacacacccctgtcctccagcaccatagagaggcgctagagcccattcctctttctccaccgtcacccaacatcaatcctttaccactctaccaaataatttcatattcaagcttcagaagctagtgaccatcttcataatttgctggagaagtgtgtttcttccccttactctcacacctgggcaaactttcttcagtgtttttcatttcttacgttctttcacttcaagggagaatatagaagcatttgatattatctacaaacactgcagaacagcatcatgtcataaacgattctgagccattcacactttttatttaattaaatgtatttaattaaatctcaaatttattttaatgtaaagaacttaaattatgttttaaacacatgccttaaatttgtttaattaaatttaactctggtttctaccagctcatacaaaataaatggtttctgaaaatgtttaagtattaacttacaaggatataggtttttctcatgtatctttttgttcattggcaagatgaaataatttttctagggtaatgccgtaggaaaaataaaacttcacatttatgtggcttgtttatccttagctcacagattgaggtaataatgacactcctagactttgggatcaaataacttagggccaagtcttgggtctgaatttatttaagttcacaacctagggcaagttactctgcctttctaagactcacttacatcttctgtgaaatataattgtaccaacctcatagagtttggtgtcaactaaatgagattatatgtggactaaatatctgtcatatagtaaacactcaataaattgcaacatattaaaaaaaaa

SEQ ID NO: 54 - protein, 175 aa, Homo sapiens
MQRRLVQQWSVAVFLLSYAVPSCGRSVEGLSRRLKRAVSEHQLLHDKGKSIQDLRRRFFLHHLIAEIHTAEIRATSEVSPNSKPSPNTKNHPVRFGSDDEGRYLTQETNKVETYKEQPLKTPGKKKKGKPGKRKEQEKKKRRTRSAWLDSGVTGSGLEGDHLSDTSTTSLELDSR

SEQ ID NO: 55 - DNA, 4713 bp, Homo sapiens
ggaaatctggcattttttaaagtttgcgccccacaaagaggaaatattccaaaggtactcaggatgtaaaaggggagatcttcacagatgcctccgtggatggcatggcaatccatccatcaatgagaagaccatgatttcttttaattttctgtgtgtttccacattccccagtgagaattcttccacctttttttgtgccatgggaaaaacctgaagggcaggcagagctgctcccgaacttgtgaccttctctgaggttgcagcggctcttgtagaacatgactctgggacatcacttccttttgttttctttcggagctgaaccaaagaatgtgcaccctctttctctagtgctgtggtgtctgcttatttttgtatttgtgctttccatccatcttctgtgatcacaaggcattcttaaggttttctagcacgacttgcggacatccagactcgtggggggcccacccatggctcggtaagccagcagcccagggcactggcactaccatgaggcactgcattaattgctgcatacagctgttacccgacggcgcacacaagcagcaggtcaactgccaagggggcccccatcacggtcaccaggcgtgccccacgtgcaaaggagaaaacaaaattctgtttcgtgtggacagtaagcagatgaacttgcttgctgttctcgaagtgaggactgaagggaacgaaaactggggtgggtttttgcgcttcaaaaaggggaagcgatgtagcctcgtttttggactgataataatgaccttggtaatggcttcttacatcctttctggggcccaccaagagcttctgatctcatcacctttccattacggaggcttccccagcaaccccagcttgatggacagcgaaaacccaagtgacacaaaggagcatcaccaccaatcctctgtaaataatatttcatacatgaaggactatccaagcattaaattaattatcaacagcatcacaactaggattgagttcacgaccagacagctcccagacttagaagaccttaagaagcaggagttgcatatgttttcagtcatccccaacaaattccttccaaacagtaagagcccctgttggtacgaggagttctcggggcagaacaccaccgacccctacctcaccaactcctacgtgctctactccaagcgcttccgctccaccttcgacgccctgcgcaaggccttctggggccacctggcgcacgcgcacgggaagcacttccgcctgcgctgcctgccgcacttctacatcatagggcagcccaagtgcgggaccacagacctctatgaccgcctgcggctgcaccctgaggtcaagttctccgccatcaaggagccacactggtggacccggaagcgctttggaatcgtccgcctaagagatgggctgcgagaccgctatcccgtggaagattatctggacctctttgacctggccgcacaccagatccatcaaggactgcaggccagctctgcaaaggagcagagcaagatgaatacaatcattatcggggaggccagtgcctccacgatgtgggataataatgcctggacgttcttctacgacaacagcacggatggcgagccaccgtttctgacgcaggacttcatccacgcctttcagccaaatgccagactgattgtcatgctcagggaccctgtggagaggttgtactcagactatctctactttgcaagttcgaataaatccgcggacgacttccatgagaaagtgacagaagcactgcagctgtttgaaaattgcatgcttgattattcactgcgcgcctgcgtctacaacaacaccctcaacaacgccatgcctgtgaggctccaggttgggctctatgctgtgtaccttctggactggctcagcgtttttgacaagcaacagtttctcattcttcgcctggaagatcatgcatccaacgtcaagtacaccatgcacaaggtcttccagtttctgaacctagggcccttaagtgagaagcaggaggctttgatgaccaagagccccgcatccaatgcacggcgtcccgaggaccggaacctggggcccatgtggcccatcacacagaagattctgcgggatttctacaggcccttcaacgctaggctggcgcaggtcctcgcggatgaggcgtttgcgtggaagacgacgtgagagctgaattgttgctgcacgtgctgggcccgccaatgccgtcatcatcaggattttacaaatctctttgcggggaactgtttcactcatggtatggaaaaccccaggactctgccactctaggcacacatgaattataaccattttggaatttccttcgtgatgttcgagagctcagcaatggacccctcacagagctcctctatccgaggccattggagaccccagtttctcaagaattcagctctgctctgagcgtcctggagcttggggatgcagccagctggcctgcactgggtgtggagagaacacctagggaaggcagcctggccctgcccgcctccgccttctggagagcctctgggttctgagtcagcaagccagaggtcatgccacaggcctggctggaacttacacttcacgttccctttttttccccctagagatggggtctcgccgtgttgcacagactgtctgtattcaatggctatcttcacaggtgtgatcataccacattcacttctgaaacactcttgttgcgatcgctaacctcactgggacagagaaccgcagtctttcgagaatggaggctcttcattttttttttctcctttactccaaactcagccctccagtttcttcagatgtaaaccctgttaacgtcactgtttccaaaaggaaaaaaataagtcagtttttggcagcaccttcatctttctgacctcctcctattctgtccttgtggacttatgtttaacatagaaaatgaatgcgtttaaaacaaaaccactttctgcatttaaccagtcctggctctctctctgctgcctcttcatacgttttctcaagaacttcagtttataattggaagagaaatttttgctgttaatgccagaatgagcaacctcaaggaattgaacacttcttggaaaatctaggtaattcaagccctcatcaggtttacaagatcatcagagaaacagaggattttaatttttagttctggccggctacaggctccatttctctgccttcccattggaaatagtttatttccacattctccactgcgtgtggtcaaagttcctcacccagcaagggactatagatactcgtgtcccaattccaaaacacaatgcacaagctgaacttgggctgaacgtggcgtgttgagatttggaatgaggtttctaagagccgtgttcttcatggaattttccaggccacttggcagcttggtttaccgatggatgggctagagatcttgtcgtttcttggaagtcacagggaagattgaagagaacgcttgagcatccttggcaacagcccaggtgggacctggatgaagctttgcactcaagtattgtcaagggaagcttcctgtgaaccaaagttctcaggccaaggtctcgcccaccaaagccagaaagtgcaagcacccgtctacccagctctaacttgtatgtgtgagacagaccaggcttcgggggtaggaggatctgcagttgttcagccgtctttctgctggtgttgtctttctgccatcagagaagggacacacagcccgttcgaaggtgtgcagagggctctgagcgccaggatggccagggctgtttttgctactgaaggagcgtgtgtcctgaactcccacttgcagggacagtccccaccttctctatagccggcactgggagcagccgccagcagggaaatctggcctgagcacaaggatgctttagggagagatcacttcagtgtgtgtgtatatttatttgcagtacagtgcgcgcgtgtgtgtgtgtgtacgcgcacgtgtgggtgagtgcgtcttctgagtgggttctgttcagttgctaatgaggctcctccgctctggacacaacccttttatagattaatttctctgccaattaacttgtcattttcagtacatattttactattccacaccaaccataattacaacaagggatttttcttatgcactcctatgcatgtgaataacatgtggtgtaattctgcttcttacagaagtattactgaaggtattatttccaatattatttggtttattatgcggatcttttttatatatgcagtcccatcccttctgtgccactcaatgccatccagacatggtttttccctccaggggcctttctctccagagggcacttcggctgcctctgcttcctctcattcgaggcccggctcttgctgacagaataggttccgttctgggcggtggttctcgagcctgccattcaaaaccaaagcaaattggagcatttctcacaacatggtattgaagttcctttttgttctcaaaagttgtgaccgtgttaaattgtactcccttagtcctgtaaggtatgttaagtgaatcgcagttacgctgtacttttattaatatttaacataattaaagatggacccataagagtgacgcctgtggagcgcgtgctcttcctctgcagccaaaaaaaaaaaaaaaaaaaaaaaaaaaaaaaaaaa

SEQ ID NO: 56 - protein, 561 aa, Homo sapiens
MRHCINCCIQLLPDGAHKQQVNCQGGPHHGHQACPTCKGENKILFRVDSKQMNLLAVLEVRTEGNENWGGFLRFKKGKRCSLVFGLIIMTLVMASYILSGAHQELLISSPFHYGGFPSNPSLMDSENPSDTKEHHHQSSVNNISYMKDYPSIKLIINSITTRIEFTTRQLPDLEDLKKQELHMFSVIPNKFLPNSKSPCWYEEFSGQNTTDPYLTNSYVLYSKRFRSTFDALRKAFWGHLAHAHGKHFRLRCLPHFYIIGQPKCGTTDLYDRLRLHPEVKFSAIKEPHWWTRKRFGIVRLRDGLRDRYPVEDYLDLFDLAAHQIHQGLQASSAKEQSKMNTIIIGEASASTMWDNNAWTFFYDNSTDGEPPFLTQDFIHAFQPNARLIVMLRDPVERLYSDYLYFASSNKSADDFHEKVTEALQLFENCMLDYSLRACVYNNTLNNAMPVRLQVGLYAVYLLDWLSVFDKQQFLILRLEDHASNVKYTMHKVFQFLNLGPLSEKQEALMTKSPASNARRPEDRNLGPMWPITQKILRDFYRPFNARLAQVLADEAFAWKTT

SEQ ID NO: 57 - DNA, 3445 bp, Homo sapiens
gagcaaccgcagcttctagtatccagactccagcgccgccccgggcgcggaccccaaccccgacccagagcttctccagcggcggcgcagcgagcagggctccccgccttaacttcctccgcggggcccagccaccttcgggagtccgggttgcccacctgcaaactctccgccttctgcacctgccacccctgagccagcgcgggcgcccgagcgagtcatggccaacgcggggctgcagctgttgggcttcattctcgccttcctgggatggatcggcgccatcgtcagcactgccctgccccagtggaggatttactcctatgccggcgacaacatcgtgaccgcccaggccatgtacgaggggctgtggatgtcctgcgtgtcgcagagcaccgggcagatccagtgcaaagtctttgactccttgctgaatctgagcagcacattgcaagcaacccgtgccttgatggtggttggcatcctcctgggagtgatagcaatctttgtggccaccgttggcatgaagtgtatgaagtgcttggaagacgatgaggtgcagaagatgaggatggctgtcattgggggtgcgatatttcttcttgcaggtctggctattttagttgccacagcatggtatggcaatagaatcgttcaagaattctatgaccctatgaccccagtcaatgccaggtacgaatttggtcaggctctcttcactggctgggctgctgcttctctctgccttctgggaggtgccctactttgctgttcctgtccccgaaaaacaacctcttacccaacaccaaggccctatccaaaacctgcaccttccagcgggaaagactacgtgtgacacagaggcaaaaggagaaaatcatgttgaaacaaaccgaaaatggacattgagatactatcattaacattaggaccttagaattttgggtattgtaatctgaagtatggtattacaaaacaaacaaacaaacaaaaaacccatgtgttaaaatactcagtgctaaacatggcttaatcttattttatcttctttcctcaatataggagggaagatttttccatttgtattactgcttcccattgagtaatcatactcaattgggggaaggggtgctccttaaatatatatagatatgtatatatacatgtttttctattaaaaatagacagtaaaatactattctcattatgttgatactagcatacttaaaatatctctaaaataggtaaatgtatttaattccatattgatgaagatgtttattggtatattttctttttcgtctatatatacatatgtaacagtcaaatatcatttactcttcttcattagctttgggtgcctttgccacaagacctagcctaatttaccaaggatgaattctttcaattcttcatgcgtgcccttttcatatacttattttattttttaccataatcttatagcacttgcatcgttattaagcccttatttgttttgtgtttcattggtctctatctcctgaatctaacacatttcatagcctacattttagtttctaaagccaagaagaatttattacaaatcagaactttggaggcaaatctttctgcatgaccaaagtgataaattcctgttgaccttcccacacaatccctgtactctgacccatagcactcttgtttgctttgaaaatatttgtccaattgagtagctgcatgctgttcccccaggtgttgtaacacaactttattgattgaatttttaagctacttattcatagttttatatccccctaaactacctttttgttccccattccttaattgtattgttttcccaagtgtaattatcatgcgttttatatcttcctaataaggtgtggtctgtttgtctgaacaaagtgctagactttctggagtgataatctggtgacaaatattctctctgtagctgtaagcaagtcacttaatctttctacctcttttttctatctgccaaattgagataatgatacttaaccagttagaagaggtagtgtgaatattaattagtttatattactctcattctttgaacatgaactatgcctatgtagtgtctttatttgctcagctggctgagacactgaagaagtcactgaacaaaacctacacacgtaccttcatgtgattcactgccttcctctctctaccagtctatttccactgaacaaaacctacacacataccttcatgtggttcagtgccttcctctctctaccagtctatttccactgaacaaaacctacgcacataccttcatgtggctcagtgccttcctctctctaccagtctatttccattctttcagctgtgtctgacatgtttgtgctctgttccattttaacaactgctcttacttttccagtctgtacagaatgctatttcacttgagcaagatgatgtaatggaaagggtgttggcattggtgtctggagacctggatttgagtcttggtgctatcaatcaccgtctgtgtttgagcaaggcatttggctgctgtaagcttattgcttcatctgtaagcggtggtttgtaattcctgatcttcccacctcacagtgatgttgtggggatccagtgagatagaatacatgtaagtgtggttttgtaatttaaaaagtgctatactaagggaaagaattgaggaattaactgcatacgttttggtgttgcttttcaaatgtttgaaaacaaaaaaaatgttaagaaatgggtttcttgccttaaccagtctctcaagtgatgagacagtgaagtaaaattgagtgcactaaacaaataagattctgaggaagtcttatcttctgcagtgagtatggcccgatgctttctgtggctaaacagatgtaatgggaagaaataaaagcctacgtgttggtaaatccaacagcaagggagatttttgaatcataataactcataaggtgctatctgttcagtgatgccctcagagctcttgctgttagctggcagctgacgctgctaggatagttagtttggaaatggtacttcataataaactacacaaggaaagtcagccactgtgtcttatgaggaattggacctaataaattttagtgtgccttccaaacctgagaatatatgcttttggaagttaaaatttaaatggcttttgccacatacatagatcttcatgatgtgtgagtgtaattccatgtggatatcagttaccaaacattacaaaaaaattttatggcccaaaatgaccaacgaaattgttacaatagaatttatccaattttgatctttttatattcttctaccacacctggaaacagaccaatagacattttggggttttataataggaatttgtataaagcattactctttttcaataaattgttttttaatttaaaaaaaggaaaaaaaaaaaaaaaaa

SEQ ID NO: 58 - protein, 211 aa, Homo sapiens
MANAGLQLLGFILAFLGWIGAIVSTALPQWRIYSYAGDNIVTAQAMYEGLWMSCVSQSTGQIQCKVFDSLLNLSSTLQATRALMVVGILLGVIAIFVATVGMKCMKCLEDDEVQKMRMAVIGGAIFLLAGLAILVATAWYGNRIVQEFYDPMTPVNARYEFGQALFTGWAAASLCLLGGALLCCSCPRKTTSYPTPRPYPKPAPSSGKDYV

SEQ ID NO: 59 - DNA, 656 bp, Homo sapiens
gggaacacatccaagcttaagacggtgaggtcagcttcacattctcaggaactctccttctttgggtctggctgaagttgaggatctcttactctctaggccacggaattaacccgagcaggcatggaggcctctgctctcacctcatcagcagtgaccagtgtggccaaagtggtcagggtggcctctggctctgccgtagttttgcccctggccaggattgctacagttgtgattggaggagttgtggctgtgcccatggtgctcagtgccatgggcttcactgcggcgggaatcgcctcgtcctccatagcagccaagatgatgtccgcggcggccattgccaatgggggtggagttgcctcgggcagccttgtggctactctgcagtcactgggagcaactggactctccggattgaccaagttcatcctgggctccattgggtctgccattgcggctgtcattgcgaggttctactagctccctgcccctcgccctgcagagaagagaaccatgccaggggagaaggcacccagccatcctgacccagcgaggagccaactatcccaaatatacctggggtgaaatataccaaattctgcatctccagaggaaaataagaaataaagatgaattgttgcaactcttcaaaa

SEQ ID NO: 60 - protein, 119 aa, Homo sapiens
MEASALTSSAVTSVAKVVRVASGSAVVLPLARIATVVIGGVVAVPMVLSAMGFTAAGIASSSIAAKMMSAAAIANGGGVASGSLVATLQSLGATGLSGLTKFILGSIGSAIAAVIARFY

SEQ ID NO: 61 - DNA, 1219 bp, Homo sapiens
gaatagtctaccccccttgcactctacctgacacagctgcagcctgcaattcactcgcactgcctgggattgcactggatccgtgtgctcagaacaaggtgaacgcccagctgcagccatgaagatctgtagcctcaccctgctctccttcctcctactggctgctcaggtgctcctggtggaggggaaaaaaaaagtgaagaatggacttcacagcaaagtggtctcagaacaaaaggacactctgggcaacacccagattaagcagaaaagcaggcccgggaacaaaggcaagtttgtcaccaaagaccaagccaactgcagatgggctgctactgagcaggaggagggcatctctctcaaggttgagtgcactcaattggaccatgaattttcctgtgtctttgctggcaatccaacctcatgcctaaagctcaaggatgagagagtctattggaaacaagttgcccggaatctgcgctcacagaaagacatctgtagatattccaagacagctgtgaaaaccagagtgtgcagaaaggattttccagaatccagtcttaagctagtcagctccactctatttgggaacacaaagcccaggaaggagaaaacagagatgtcccccagggagcacatcaaaggcaaagagaccaccccctctagcctagcagtgacccagaccatggccaccaaagctcccgagtgtgtggaggacccagatatggcaaaccagaggaagactgccctggagttctgtggagagacttggagctctctctgcacattcttcctcagcatagtgcaggacacgtcatgctaatgaggtcaaaagagaacgggttcccttaagagatgtcatgtcgtaagtccctctgtatactttaaagctctctacagtccccccaaaatatgaacttttgtgcttagtgagtgcaacgaaatatttaaacaagttttgtattttttgcttttgtgttttggaatttgccttatttttcttggatgcgatgttcagaggctgtttcctgcagcatgtatttccatggcccacacagctatgtgtttgagcagcgaagagtctttgagctgaatgagccagagtgataatttcagtgcaacgaactttctgctgaattaatggtaataaaactctgggtgtttttcagaaatacattcaaaaaaaaaaaaaaaaaaaaaaaaaaaaaaaaaaaaaaaa

SEQ ID NO: 62 - protein, 234 aa, Homo sapiens [sequence omitted]

SEQ ID NO: 63 - DNA, 586 bp, Homo sapiens
aaacactctgtgtggctcctcggctttgacagagtgcaagacgatgacttgcaaaatgtcgcagctggaacgcaacatagagaccatcatcaacaccttccaccaatactctgtgaagctggggcacccagacaccctgaaccagggggaattcaaagagctggtgcgaaaagatctgcaaaattttctcaagaaggagaataagaatgaaaaggtcatagaacacatcatggaggacctggacacaaatgcagacaagcagctgagcttcgaggagttcatcatgctgatggcgaggctaacctgggcctcccacgagaagatgcacgagggtgacgagggccctggccaccaccataagccaggcctcggggagggcaccccctaagaccacagtggccaagatcacagtggccacggccacggccacagtcatggtggccacggccacagccactaatcaggaggccaggccaccctgcctctacccaaccagggccccggggcctgttatgtcaaactgtcttggctgtggggctaggggctggggccaaataaagtctcttcctccaagtcaaaaaaaaaa

SEQ ID NO: 64 - protein, 114 aa, Homo sapiens
MTCKMSQLERNIETIINTFHQYSVKLGHPDTLNQGEFKELVRKDLQNFLKKENKNEKVIEHIMEDLDTNADKQLSFEEFIMLMARLTWASHEKMHEGDEGPGHHHKPGLGEGTP

SEQ ID NO: 65 - DNA, 2058 bp, Homo sapiens
gcacgaggaagccacagatctcttaagaactttctgtctccaaaccgtggctgctcgataaatcagacagaacagttaatcctcaatttaagcctgatctaacccctagaaacagatatagaacaatggaagtgacaacaagattgacatggaatgatgaaaatcatctgcgcaactgcttggaaatgtttctttgagtcttctctataagtctagtgttcatggaggtagcattgaagatatggttgaaagatgcagccgtcagggatgtactataacaatggcttacattgattacaatatgattgtagcctttatgcttggaaattatattaatttacgtgaaagttctacagagccaaatgattccctatggttttcacttcaaaagaaaaatgacaccactgaaatagaaactttactcttaaatacagcaccaaaaattattgatgagcaactggtgtgtcgtttatcgaaaacggatattttcattatatgtcgagataataaaatttatctagataaaatgataacaagaaacttgaaactaaggttttatggccaccgtcagtatttggaatgtgaagtttttcgagttgaaggaattaaggataacctagacgacataaagaggataattaaagccagagagcacagaaataggcttctagcagacatcagagactataggccctatgcagacttggtttcagaaattcgtattcttttggtgggtccagttgggtctggaaagtccagttttttcaattcagtcaagtctatttttcatggccatgtgactggccaagccgtagtggggtctgataccaccagcataaccgagcggtataggatatattctgttaaagatggaaaaaatggaaaatctctgccatttatgttgtgtgacactatggggctagatggggcagaaggagcaggactgtgcatggatgacattccccacatcttaaaaggttgtatgccagacagatatcagtttaattcccgtaaaccaattacacctgagcattctacttttatcacctctccatctctgaaggacaggattcactgtgtggcttatgtcttagacatcaactctattgacaatctctactctaaaatgttggcaaaagtgaagcaagttcacaaagaagtattaaactgtggtatagcatatgtggccttgcttactaaagtggatgattgcagtgaggttcttcaagacaactttttaaacatgagtagatctatgacttctcaaagccgggtcatgaatgtccataaaatgctaggcattcctatttccaatattttgatggttggaaattatgcttcagatttggaactggaccccatgaaggatattctcatcctctctgcactgaggcagatgctgcgggctgcagatgattttttagaagatttgcctcttgaggaaactggtgcaattgagagagcgttacagccctgcatttgagataagttgccttgattctgacatttggcccagcctgtactggtgtgccgcaatgagagtcaatctctattgacagcctgcttcagattttgcttttgttcgttttgccttctgtccttggaacagtcatatctcaagttcaaaggccaaaacctgagaagcggtgggctaagataggtcctactgcaaaccacccctccatatttccgtaccatttacaattcagtttctgtgacatctttttaaaccactggaggaaaaatgagatattctctaatttattcttctataacactctatatagagctatgtgagtactaatcacattgaataatagttataaaattattgtatagacatctgcttcttaaacagattgtgagttctttgagaaacagcgtggattttacttatctgtgtattcacagagcttagcacagtgcctggtaatgagcaagcatacttgccattacttttccttcccactctctccaacatcacattcactttaaatttttctgtatatagaaaggaaaactagcctgggcaacatgatgaaaccccatctccactgc

SEQ ID NO: 66 - protein, 413 aa, Homo sapiens
MVERCSRQGCTITMAYIDYNMIVAFMLGNYINLRESSTEPNDSLWFSLQKKNDTTEIETLLLNTAPKIIDEQLVCRLSKTDIFIICRDNKIYLDKMITRNLKLRFYGHRQYLECEVFRVEGIKDNLDDIKRIIKAREHRNRLLADIRDYRPYADLVSEIRILLVGPVGSGKSSFFNSVKSIFHGHVTGQAVVGSDTTSITERYRIYSVKDGKNGKSLPFMLCDTMGLDGAEGAGLCMDDIPHILKGCMPDRYQFNSRKPITPEHSTFITSPSLKDRIHCVAYVLDINSIDNLYSKMLAKVKQVHKEVLNCGIAYVALLTKVDDCSEVLQDNFLNMSRSMTSQSRVMNVHKMLGIPISNILMVGNYASDLELDPMKDILILSALRQMLRAADDFLEDLPLEETGAIERALQPCI

SEQ ID NO: 67 - DNA, 3295 bp, Homo sapiens
tggagagggacaggaggaaacgcagcgccagcagcatctcatctaccctccttgacacctccccgtggctccagccagaccctagaggtcagccttgcggaccaacaggaggactcccagctttcccttttcaagaggtccccagacaccggccaccctcttccagcccctgcggccagtgcaaggaggcaccaatgctctgaggctgtcgcgtggtgcagcgtcgagcatcctcgccgaggtcctttctgctgcctgtcccgcctcaccccgctccatcacaccagctggccctctttgcttccttttcccagaatcgttaagccccgactcccactagcacctcgtaccaacctcgccccaccccatcctcctgccttcccgcgctccggtgtcccccgctgccatgagctcccccatcagcaagagccgctcgcttgccgccttcctgcagcagctgcgcagtccgaggcagcccccgagactggtgacatctacggcgtacacgtcccctcagccgcgagaggtgccagtctgcccgctgacagctggtggcgagactcagaacgcggccgccctgccgggccccaccagctggccactgctgggcagcctgctgcagattctctggaaagggggtctcaagaaacagcacgacaccctggtggagtaccacaagaagtatggcaagattttccgcatgaagttgggttcctttgagtcggtgcacctgggctcgccatgcctgctggaagcgctgtaccgcaccgagagcgcgtacccgcagcggctggagatcaaaccgtggaaggcctatcgcgactaccgcaaagaaggctacgggctgctgatcctggaaggggaagactggcagcgggtccggagtgcctttcaaaagaaactaatgaaaccaggggaagtgatgaagctggacaacaaaatcaatgaggtcttggccgattttatgggcagaatagatgagctctgtgatgaaagaggccacgtcgaagacttgtacagcgaactgaacaaatggtcgtttgaaagtatctgcctcgtgttgtatgagaagagatttgggcttctccagaagaatgcaggggatgaagctgtgaacttcatcatggccatcaaaacaatgatgagcacgtttgggaggatgatggtcactccagtcgagctgcacaagagcctcaacaccaaggtctggcaggaccacactctggcctgggacaccattttcaaatcagtcaaagcttgtatcgacaaccggttagagaagtattctcagcagcctagtgcagatttcctttgtgacatttatcaccagaatcggctttcaaagaaagaattgtatgctgctgtcacagagctccagctggctgcggtggaaacgacagcaaacagtctaatgtggattctctacaatttatcccgtaatccccaagtgcaacaaaagcttcttaaggaaattcaaagtgtattacctgagaatcaggtgccacgggcagaagatttgaggaatatgccgtatttaaaagcctgtctgaaagaatctatgaggcttacgccgagtgtaccatttacaactcggactcttgacaaggcaacagttctgggtgaatatgctttacccaaaggaacagtgctcatgctaaatacccaggtgttgggatccagtgaagacaattttgaagattcaagtcagtttagacctgaacgttggcttcaggagaaggaaaaaattaatccttttgcgcatcttccatttggcgttggaaaaagaatgtgcattggtcgccgattagcagagcttcaactgcatttggctctttgttggattgtccgcaaatacgacatccaggccacagacaatgagcctgttgagatgctacactcaggcaccctggtgcccagccgggaactccccatcgcgttttgccagcgataatacgcctcagatggtggtatttgctaacatcatatccaactcagggaagcggactgagtgctgggatccaaggcattctacagggttcactgctggtttacacttcacctgtgtcagcaccatcttcaggtgcttagaatggcctgggagcctgttctgtcttgcatcttccatgacatgaaagggaggctggcacttgtcagtcaggtagaggttacaaaccgtttcaggccctgcctaccacattcactgtttgaatctttaattcccaagaataagtttacatttcacaatgaatgacctacaacagctaaattttctggggctgggagtaatactgacaatccatttactgtagctctgcttaatgtactacttaggaaaatgtccctgcttaataatgtaagccaagctaaatgatggttaaagttatcaggcctcccatgaaattgcgttcttcctgcattgaaataaaaacattattgggaaactagagaacacctctatttttaaaaggactttaacgaagtcaaacaacttataagactagtgattcactggggcattattttgttagaggaccttaaaattgtttattttttaaatgtgattcctttatggcattagggtaaagatgaagcaataatttttaaattgtgtatgtgcatatgaagcacagacatgcatgtgtgtgtgtgtctgtgtgtgtgtgtccgtgtatgtgtgtgtgggttctaatggtaatttgcctcagtcatttttttaatatttgcagtacttgatttaggatctgtggtgcagggcaatgtttcaaagtttagtcacagcttaaaaacattcagtgtgactttaatattataaaatgatttcccatgccataatttttctgtctattaaatgggacaagtgtaaagcatgcaaaagttagagatctgttatataacatttgttttgtgatttgaactcctaggaaaaatatgatttcataaatgtaaaatgcacagaaatgcatgcaatacttataagacttaaaaattgtgtttacagatggtttatttgtgcatatttttactactgcttttcctaaatgcatactgtatataattctgtgtatttgataaatatttcttcctacattatatttttagaatatttcagaaatatacatttatgtctttatattgtaataaatatgtacatatctaggtatatgctttctctctgctgtgaaattatttttagaattataaattcacgtcttgtcagatttcatctgtataccttcaaattctctgaaagtaaaaataaaagtttttaaatattaaaaaaaaaaaaaaaaaaaaa

SEQ ID NO: 68 - protein, 514 aa, Homo sapiens
MSSPISKSRSLAAFLQQLRSPRQPPRLVTSTAYTSPQPREVPVCPLTAGGETQNAAALPGPTSWPLLGSLLQILWKGGLKKQHDTLVEYHKKYGKIFRMKLGSFESVHLGSPCLLEALYRTESAYPQRLEIKPWKAYRDYRKEGYGLLILEGEDWQRVRSAFQKKLMKPGEVMKLDNKINEVLADFMGRIDELCDERGHVEDLYSELNKWSFESICLVLYEKRFGLLQKNAGDEAVNFIMAIKTMMSTFGRMMVTPVELHKSLNTKVWQDHTLAWDTIFKSVKACIDNRLEKYSQQPSADFLCDIYHQNRLSKKELYAAVTELQLAAVETTANSLMWILYNLSRNPQVQQKLLKEIQSVLPENQVPRAEDLRNMPYLKACLKESMRLTPSVPFTTRTLDKATVLGEYALPKGTVLMLNTQVLGSSEDNFEDSSQFRPERWLQEKEKINPFAHLPFGVGKRMCIGRRLAELQLHLALCWIVRKYDIQATDNEPVEMLHSGTLVPSRELPIAFCQR

SEQ ID NO: 69 - DNA, 2741 bp, Homo sapiens
ggacttcgccagatcagacccacggggctgccctcccctgcgcactcccctcgctgcccgggcccggagcgcagcgcggccgcacaggtatttttgctgtgctgtgcaaggaactctgctagctcaagattcacaatgttgaaagcccttttcctaactatgctgactctggcgctggtcaagtcacaggacaccgaagaaaccatcacgtacacgcaatgcactgacggatatgagtgggatcctgtgagacagcaatgcaaagatattgatgaatgtgacattgtcccagacgcttgtaaaggtggaatgaagtgtgtcaaccactatggaggatacctctgccttccgaaaacagcccagattattgtcaataatgaacagcctcagcaggaaacacaaccagcagaaggaacctcaggggcaaccaccggggttgtagctgccagcagcatggcaaccagtggagtgttgcccgggggtggttttgtggccagtgctgctgcagtcgcaggccctgaaatgcagactggccgaaataactttgtcatccggcggaacccagctgaccctcagcgcattccctccaacccttcccaccgtatccagtgtgcagcaggctacgagcaaagtgaacacaacgtgtgccaagacatagacgagtgcactgcagggacgcacaactgtagagcagaccaagtgtgcatcaatttacggggatcctttgcatgtcagtgccctcctggatatcagaagcgaggggagcagtgcgtagacatagatgaatgtaccatccctccatattgccaccaaagatgcgtgaatacaccaggctcattttattgccagtgcagtcctgggtttcaattggcagcaaacaactatacctgcgtagatataaatgaatgtgatgccagcaatcaatgtgctcagcagtgctacaacattcttggttcattcatctgtcagtgcaatcaaggatatgagctaagcagtgacaggctcaactgtgaagacattgatgaatgcagaacctcaagctacctgtgtcaatatcaatgtgtcaatgaacctgggaaattctcatgtatgtgcccccagggataccaagtggtgagaagtagaacatgtcaagatataaatgagtgtgagaccacaaatgaatgccgggaggatgaaatgtgttggaattatcatggcggcttccgttgttatccacgaaatccttgtcaagatccctacattctaacaccagagaaccgatgtgtttgcccagtctcaaatgccatgtgccgagaactgccccagtcaatagtctacaaatacatgagcatccgatctgataggtctgtgccatcagacatcttccagatacaggccacaactatttatgccaacaccatcaatacttttcggattaaatctggaaatgaaaatggagagttctacctacgacaaacaagtcctgtaagtgcaatgcttgtgctcgtgaagtcattatcaggaccaagagaacatatcgtggacctggagatgctgacagtcagcagtatagggaccttccgcacaagctctgtgttaagattgacaataatagtggggccattttcattttagtcttttctaagagtcaaccacaggcatttaagtcagccaaagaatattgttaccttaaagcactattttatttatagatatatctagtgcatctacatctctatactgtacactcacccataattcaaacaattacaccatggtataaagtgggcatttaatatgtaaagattcaaagtttgtctttattactatatgtaaattagacattaatccactaaactggtcttcttcaagagagctaagtatacactatctggtgaaacttggattctttcctataaaagtgggaccaagcaatgatgatcttctgtggtgcttaaggaaacttactagagctccactaacagtctcataaggaggcagccatcataaccattgaatagcatgcaagggtaagaatgagtttttaactgctttgtaagaaaatggaaaaggtcaataaagatatatttctttagaaaatggggatctgccatatttgtgttggtttttattttcatatccagcctaaaggtggttgtttattatatagtaataaatcattgctgtacaatatgctggtttctgtagggtatttttaattttgtcagaaattttagattgtgaatattttgtaaaaaacagtaagcaaaattttccagaattcccaaaatgaaccagatatcccctagaaaattatactattgagaaatctatggggaggatatgagaaaataaattccttctaaaccacattggaactgacctgaagaagcaaactcggaaaatataataacatccctgaattcaggacttccacaagatgcagaacaaaatggataaaaggtatttcactggagaagttttaatttctaagtaaaatttaaatcctaacacttcactaatttataactaaaatttctcatcttcgtacttgatgctcacagaggaagaaaatgatgatggtttttattcctggcatccagagtgacagtgaacttaagcaaattaccctcctacccaattctatggaatattttatacgtctccttgtttaaaatgtcactgctttactttgatgtatcatatttttaaataaaaataaatattcctttagaagatcaaaaaaaaaaaaaaaaaaa

SEQ ID NO: 70 - protein, 493 aa, Homo sapiens
MLKALFLTMLTLALVKSQDTEETITYTQCTDGYEWDPVRQQCKDIDECDIVPDACKGGMKCVNHYGGYLCLPKTAQIIVNNEQPQQETQPAEGTSGATTGVVAASSMATSGVLPGGGFVASAAAVAGPEMQTGRNNFVIRRNPADPQRIPSNPSHRIQCAAGYEQSEHNVCQDIDECTAGTHNCRADQVCINLRGSFACQCPPGYQKRGEQCVDIDECTIPPYCHQRCVNTPGSFYCQCSPGFQLAANNYTCVDINECDASNQCAQQCYNILGSFICQCNQGYELSSDRLNCEDIDECRTSSYLCQYQCVNEPGKFSCMCPQGYQVVRSRTCQDINECETTNECREDEMCWNYHGGFRCYPRNPCQDPYILTPENRCVCPVSNAMCRELPQSIVYKYMSIRSDRSVPSDIFQIQATTIYANTINTFRIKSGNENGEFYLRQTSPVSAMLVLVKSLSGPREHIVDLEMLTVSSIGTFRTSSVLRLTIIVGPFSF

SEQ ID NO: 71 - DNA, 853 bp, Homo sapiens
ctagtcctgacttcacttctgatgaggaagcctctctccttagccttcagcctttcctcccaccctgccataagtaatttgatcctcaagaagttaaaccacacctcattggtccctggctaattcaccaatttacaaacagcaggaaatagaaacttaagagaaatacacacttctgagaaactgaaacgacaggggaaaggaggtctcactgagcaccgtcccagcatccggacaccacagcggcccttcgctccacgcagaaaaccacacttctcaaaccttcactcaacacttccttccccaaagccagaagatgcacaaggaggaacatgaggtggctgtgctgggggcaccccccagcaccatccttccaaggtccaccgtgatcaacatccacagcgagacctccgtgcccgaccatgtcgtctggtccctgttcaacaccctcttcttgaactggtgctgtctgggcttcatagcattcgcctactccgtgaagtctagggacaggaagatggttggcgacgtgaccggggcccaggcctatgcctccaccgccaagtgcctgaacatctgggccctgattctgggcatcctcatgaccattggattcatcctgtcactggtattcggctctgtgacagtctaccatattatgttacagataatacaggaaaaacggggttactagtagccgcccatagcctgcaacctttgcactccactgtgcaatgctggccctgcacgctggggctgttgcccctgcccccttggtcctgcccctagatacagcagtttatacccacacacctgtctacagtgtcattcaataaagtgcacgtgcttgtga

SEQ ID NO: 72 - protein, 125 aa, Homo sapiens
MHKEEHEVAVLGAPPSTILPRSTVINIHSETSVPDHVVWSLFNTLFLNWCCLGFIAFAYSVKSRDRKMVGDVTGAQAYASTAKCLNIWALILGILMTIGFILSLVFGSVTVYHIMLQIIQEKRGY

SEQ ID NO: 73 - DNA, 5175 bp, Homo sapiens
acagcggagcgcagagtgagaaccaccaaccgaggcgccgggcagcgacccctgcagcggagacagagactgagcggcccggcaccgccatgcctgcgctctggctgggctgctgcctctgcttctcgctcctcctgcccgcagcccgggccacctccaggagggaagtctgtgattgcaatgggaagtccaggcagtgtatctttgatcgggaacttcacagacaaactggtaatggattccgctgcctcaactgcaatgacaacactgatggcattcactgcgagaagtgcaagaatggcttttaccggcacagagaaagggaccgctgtttgccctgcaattgtaactccaaaggttctcttagtgctcgatgtgacaactctggacggtgcagctgtaaaccaggtgtgacaggagccagatgcgaccgatgtctgccaggcttccacatgctcacggatgcggggtgcacccaagaccagagactgctagactccaagtgtgactgtgacccagctggcatcgcagggccctgtgacgcgggccgctgtgtctgcaagccagctgttactggagaacgctgtgataggtgtcgatcaggttactataatctggatggggggaaccctgagggctgtacccagtgtttctgctatgggcattcagccagctgccgcagctctgcagaatacagtgtccataagatcacctctacctttcatcaagatgttgatggctggaaggctgtccaacgaaatgggtctcctgcaaagctccaatggtcacagcgccatcaagatgtgtttagctcagcccaacgactagaccctgtctattttgtggctcctgccaaatttcttgggaatcaacaggtgagctatgggcaaagcctgtcctttgactaccgtgtggacagaggaggcagacacccatctgcccatgatgtgattctggaaggtgctggtctacggatcacagctcccttgatgccacttggcaagacactgccttgtgggctcaccaagacttacacattcaggttaaatgagcatccaagcaataattggagcccccagctgagttactttgagtatcgaaggttactgcggaatctcacagccctccgcatccgagctacatatggagaatacagtactgggtacattgacaatgtgaccctgatttcagcccgccctgtctctggagccccagcaccctgggttgaacagtgtatatgtcctgttgggtacaaggggcaattctgccaggattgtgcttctggctacaagagagattcagcgagactggggccttttggcacctgtattccttgtaactgtcaagggggaggggcctgtgatccagacacaggagattgttattcaggggatgagaatcctgacattgagtgtgctgactgcccaattggtttctacaacgatccgcacgacccccgcagctgcaagccatgtccctgtcataacgggttcagctgctcagtgatgccggagacggaggaggtggtgtgcaataactgccctcccggggtcaccggtgcccgctgtgagctctgtgctgatggctactttggggacccctttggtgaacatggcccagtgaggccttgtcagccctgtcaatgcaacaacaatgtggaccccagtgcctctgggaattgtgaccggctgacaggcaggtgtttgaagtgtatccacaacacagccggcatctactgcgaccagtgcaaagcaggctacttcggggacccattggctcccaacccagcagacaagtgtcgagcttgcaactgtaaccccatgggctcagagcctgtaggatgtcgaagtgatggcacctgtgtttgcaagccaggatttggtggccccaactgtgagcatggagcattcagctgtccagcttgctataatcaagtgaagattcagatggatcagtttatgcagcagcttcagagaatggaggccctgatttcaaaggctcagggtggtgatggagtagtacctgatacagagctggaaggcaggatgcagcaggctgagcaggcccttcaggacattctgagagatgcccagatttcagaaggtgctagcagatcccttggtctccagttggccaaggtgaggagccaagagaacagctaccagagccgcctggatgacctcaagatgactgtggaaagagttcgggctctgggaagtcagtaccagaaccgagttcgggatactcacaggctcatcactcagatgcagctgagcctggcagaaagtgaagcttccttgggaaacactaacattcctgcctcagaccactacgtggggccaaatggctttaaaagtctggctcaggaggccacaagattagcagaaagccacgttgagtcagccagtaacatggagcaactgacaagggaaactgaggactattccaaacaagccctctcactggtgcgcaaggccctgcatgaaggagtcggaagcggaagcggtagcccggacggtgctgtggtgcaagggcttgtggaaaaattggagaaaaccaagtccctggcccagcagttgacaagggaggccactcaagcggaaattgaagcagataggtcttatcagcacagtctccgcctcctggattcagtgtctcggcttcagggagtcagtgatcagtcctttcaggtggaagaagcaaagaggatcaaacaaaaagcggattcactctcaacgctggtaaccaggcatatggatgagttcaagcgtacacaaaagaatctgggaaactggaaagaagaagcacagcagctcttacagaatggaaaaagtgggagagagaaatcagatcagctgctttcccgtgccaatcttgctaaaagcagagcacaagaagcactgagtatgggcaatgccactttttatgaagttgagagcatccttaaaaacctcagagagtttgacctgcaggtggacaacagaaaagcagaagctgaagaagccatgaagagactctcctacatcagccagaaggtttcagatgccagtgacaagacccagcaagcagaaagagccctggggagcgctgctgctgatgcacagagggcaaagaatggggccggggaggccctggaaatctccagtgagattgaacaggagattgggagtctgaacttggaagccaatgtgacagcagatggagccttggccatggaaaagggactggcctctctgaagagtgagatgagggaagtggaaggagagctggaaaggaaggagctggagtttgacacgaatatggatgcagtacagatggtgattacagaagcccagaaggttgataccagagccaagaacgctggggttacaatccaagacacactcaacacattagacggcctcctgcatctgatggaccagcctctcagtgtagatgaagaggggctggtcttactggagcagaagctttcccgagccaagacccagatcaacagccaactgcggcccatgatgtcagagctggaagagagggcacgtcagcagaggggccacctccatttgctggagacaagcatagatgggattctggctgatgtgaagaacttggagaacattagggacaacctgcccccaggctgctacaatacccaggctcttgagcaacagtgaagctgccataaatatttctcaactgaggttcttgggatacagatctcagggctcgggagccatgtcatgtgagtgggtgggatggggacatttgaacatgtttaatgggtatgctcaggtcaactgacctgaccccattcctgatcccatggccaggtggttgtcttattgcaccatactccttgcttcctgatgctgggcaatgaggcagatagcactgggtgtgagaatgatcaaggatctggaccccaaagaatagactggatggaaagacaaactgcacaggcagatgtttgcctcataatagtcgtaagtggagtcctggaatttggacaagtgctgttgggatatagtcaacttattctttgagtaatgtgactaaaggaaaaaactttgactttgcccaggcatgaaattcttcctaatgtcagaacagagtgcaacccagtcacactgtggccagtaaaatactattgcctcatattgtcctctgcaagcttcttgctgatcagagttcctcctacttacaacccagggtgtgaacatgttctccattttcaagctggaagaagtgagcagtgttggagtgaggacctgtaaggcaggcccattcagagctatggtgcttgctggtgcctgccaccttcaagttctggacctgggcatgacatcctttcttttaatgatgccatggcaacttagagattgcatttttattaaagcatttcctaccagcaaagcaaatgttgggaaagtatttactttttcggtttcaaagtgatagaaaagtgtggcttgggcattgaaagaggtaaaattctctagatttattagtcctaattcaatcctacttttcgaacaccaaaaatgatgcgcatcaatgtattttatcttattttctcaatctcctctctctttcctccacccataataagagaatgttcctactcacacttcagctgggtcacatccatccctccattcatccttccatccatctttccatccattacctccatccatccttccaacatatatttattgagtacctactgtgtgccaggggctggtgggacagtggtgacatagtctctgccctcatagagttgattgtctagtgaggaagacaagcatttttaaaaaataaatttaaacttacaaactttgtttgtcacaagtggtgtttattgcaataaccgcttggtttgcaacctctttgctcaacagaacatatgttgcaagaccctcccatgggggcacttgagttttggcaaggctgacagagctctgggttgtgcacatttctttgcattccagctgtcactctgtgcctttctacaactgattgcaacagactgttgagttatgataacaccagtgggaattgctggaggaaccagaggcacttccaccttggctgggaagactatggtgctgccttgcttctgtatttccttggattttcctgaaagtgtttttaaataaagaacaattgttagatgcc

SEQ ID NO: 74 - protein, 1193 aa, Homo sapiens
MPALWLGCCLCFSLLLPAARATSRREVCDCNGKSRQCIFDRELHRQTGNGFRCLNCNDNTDGIHCEKCKNGFYRHRERDRCLPCNCNSKGSLSARCDNSGRCSCKPGVTGARCDRCLPGFHMLTDAGCTQDQRLLDSKCDCDPAGIAGPCDAGRCVCKPAVTGERCDRCRSGYYNLDGGNPEGCTQCFCYGHSASCRSSAEYSVHKITSTFHQDVDGWKAVQRNGSPAKLQWSQRHQDVFSSAQRLDPVYFVAPAKFLGNQQVSYGQSLSFDYRVDRGGRHPSAHDVILEGAGLRITAPLMPLGKTLPCGLTKTYTFRLNEHPSNNWSPQLSYFEYRRLLRNLTALRIRATYGEYSTGYIDNVTLISARPVSGAPAPWVEQCICPVGYKGQFCQDCASGYKRDSARLGPFGTCIPCNCQGGGACDPDTGDCYSGDENPDIECADCPIGFYNDPHDPRSCKPCPCHNGFSCSVMPETEEVVCNNCPPGVTGARCELCADGYFGDPFGEHGPVRPCQPCQCNNNVDPSASGNCDRLTGRCLKCIHNTAGIYCDQCKAGYFGDPLAPNPADKCRACNCNPMGSEPVGCRSDGTCVCKPGFGGPNCEHGAFSCPACYNQVKIQMDQFMQQLQRMEALISKAQGGDGVVPDTELEGRMQQAEQALQDILRDAQISEGASRSLGLQLAKVRSQENSYQSRLDDLKMTVERVRALGSQYQNRVRDTHRLITQMQLSLAESEASLGNTNIPASDHYVGPNGFKSLAQEATRLAESHVESASNMEQLTRETEDYSKQALSLVRKALHEGVGSGSGSPDGAVVQGLVEKLEKTKSLAQQLTREATQAEIEADRSYQHSLRLLDSVSRLQGVSDQSFQVEEAKRIKQKADSLSTLVTRHMDEFKRTQKNLGNWKEEAQQLLQNGKSGREKSDQLLSRANLAKSRAQEALSMGNATFYEVESILKNLREFDLQVDNRKAEAEEAMKRLSYISQKVSDASDKTQQAERALGSAAADAQRAKNGAGEALEISSEIEQEIGSLNLEANVTADGALAMEKGLASLKSEMREVEGELERKELEFDTNMDAVQMVITEAQKVDTRAKNAGVTIQDTLNTLDGLLHLMDQPLSVDEEGLVLLEQKLSRAKTQINSQLRPMMSELEERARQQRGHLHLLETSIDGILADVKNLENIRDNLPPGCYNTQALEQQ

SEQ ID NO: 75 - DNA, 2210 bp, Homo sapiens
gtccagagccttgcctgcttgtgatcctggtggagaaggtggagtatggtgagctgcttgctaaggacagccaggcaacactgtgtttgtgaagatgtgctccaccttctcctctgtgcatcccagctcctcctgctgaaacagctgagcttgctttttggatttcttagactcctggcctctgagagacacctctaaggacaaactgaccttgcattgggaactttattatccagatcctcataggctttgtctactctggattgcttgttgcaacagttcttaggaagcaagattgtctcctgcaccagcatctgcctgtgtttgcttttacctactttgagcaagacccagtgaggccctagctctgttggtcctgaaaagcctgaaccctgaggctgtttctcctgcctccaaaatgcaattataggaaataagaagcacagaaacagtggaaacaaccaggaggagaaacaggaaaacctaaaattttcaatattcaaaaatacctgtcgtggtggttgatgcagaaaacactgagttcatcaaagagctttgtaattgttggaccagagaacccctttgctacaggaactgatatgttttgtctttctggcctagtcaagggaggataagtaagtatctggggcatggaaggaatgcactcttgggctgttttgcttgtatctgactcacccctgactctccagtgaagcagaaaggaagaaacctcacaccacccaggtgtggccagactttggccattattgtgaatccccaagagttaccacaggcccttcccaaatatatatttaatcttgtggttcaaataagcttttggctcacatctaagcacatcataaagaacgctgtagaagaggtgacatgatgaggcgggaagacgaggaagaggagggaacaatgatgaaggcaaaaggggacttagagatgaaggaggaggaagagattagtgagacaggagaactggttggcccttttgtgagtgctatgcccactccaatgccccacaacaagggcacccggttctctgaggcatgggaatatttccacctagctcctgctcgtgctgggcaccatcccaaccagtatgccacctgccgcctgtgtggcaggcaggtgagccgtggccctggggtcaacgtgggcaccactgcactgtggaagcatctgaaaagcatgcacagagaggagctggagaagagtggccatggtcaggctgggcagcgccaggatccaaggccccacgggccccagctccccacaggcattgagggtaactggggtaggctcctggagcaggtgggcaccatggctttgtgggccagccaaagggaaaaggaggtgcttaggagggaaagggcagtggaatggcgggagagggctgtggaaaaaagggagcgagccctggaggaggtggaaagggccatcctggagatgaagtggaaggtgagggctgagaaggaggcatgccagcgggagaaagagctgcctgcagcagtacatcccttccattttgtttaaattgggcttggagaatctattctgaaaacattgactctagacttgtagaaaagagccattttagtttcaactcaaatgtaaagcaaagtagtttggtgacattttgcttttatgtgaaatagtgcacagtatgagttaatctgagcaggtctgaattgaccaaatgcttatctacgaggttcctagagctctgctgacccttggccgaaactctaaaatgtacctattaaagataaatgcttctaccaaagtaaaactctgtgagttgtttcagggcagaatgtaccagccagtcagcgttgtttaacaaaataatcagatttttgcctagcactcggttttggtggagctgacgattttgagggctgaggctggttaggtagctggaatgtgcctatgtgaccagctcacttgcagacaccctgccggaagcagagcttaatcttcctaggactgaggtcttagcacatgtactggtggagtttccagaccaccagtatgaataaaagcttgttctgtgtgacccagcaagtggaaggacaaagaactgtgagcctcagatctttggacctttccaatgcgtctctttctcctgttattgctgcaatgtattttcttgcttatattaaagttgtttcatcagtaaaaaaaaaaaaaaaaaaaaaaaa

SEQ ID NO: 76 - protein, 218 aa, Homo sapiens
MMRREDEEEEGTMMKAKGDLEMKEEEEISETGELVGPFVSAMPTPMPHNKGTRFSEAWEYFHLAPARAGHHPNQYATCRLCGRQVSRGPGVNVGTTALWKHLKSMHREELEKSGHGQAGQRQDPRPHGPQLPTGIEGNWGRLLEQVGTMALWASQREKEVLRRERAVEWRERAVEKRERALEEVERAILEMKWKVRAEKEACQREKELPAAVHPFHFV

SEQ ID NO: 77 - DNA, 985 bp, Homo sapiens
caaaccatgggaggctcctctcctagaccctgcatcctgaaagctgcgtacctgagagcctgcggtctggctgcagggacacacccaaggggaggagctgcaatcgtgtctggggccccagcccaggctggccggagctcctgtttcccgctgctctgctgcctgcccggggtaccaacatggcccagaagcgtcctgcctgcaccctgaagcctgagtgtgtccagcagctgctggtttgctcccaggaggccaagaagtcagcctactgcccctacagtcactttcctgtgggggctgccctgctcacccaggaggggagaatcttcaaagggtgcaacatagaaaatgcctgctacccgctgggcatctgtgctgaacggaccgctatccagaaggccgtctcagaagggtacaaggatttcagggcaattgctatcgccagtgacatgcaagatgattttatctctccatgtggggcctgcaggcaagtcatgagagagtttggcaccaactggcccgtgtacatgaccaagccggatggtacgtatattgtcatgacggtccaggagctgctgccctcctcctttgggcctgaggacctgcagaagacccagtgacagccagagaatgcccactgcctgtaacagccacctggagaacttcataaagatgtctcacagccctggggacacctgcccagtgggccccagccctacagggactgggcaaagatgatgtttccagattacactccagcctgagtcagcacccctcctagcaacctgccttgggacttagaacaccgccgccccctgccccacctttcctttccttcctgtgggccctctttcaaagtccagcctagtctggactgcttccccatcagccttcccaaggttctatcctgttccgagcaacttttctaattataaacatcacagaacatcctggatcaaaaaaaaaaaaaaaaaaaaaaaaaaaa

SEQ ID NO: 78 - protein, 146 aa, Homo sapiens [sequence omitted]

SEQ ID NO: 79 - DNA, 1551 bp, Homo sapiens
ggcgcccaagccgccgccgccagatcggtgccgattcctgccctgccccgaccgccagcgcgaccatgtcccatcactgggggtacggcaaacacaacggacctgagcactggcataaggacttccccattgccaagggagagcgccagtcccctgttgacatcgacactcatacagccaagtatgacccttccctgaagcccctgtctgtttcctatgatcaagcaacttccctgaggatcctcaacaatggtcatgctttcaacgtggagtttgatgactctcaggacaaagcagtgctcaagggaggacccctggatggcacttacagattgattcagtttcactttcactggggttcacttgatggacaaggttcagagcatactgtggataaaaagaaatatgctgcagaacttcacttggttcactggaacaccaaatatggggattttgggaaagctgtgcagcaacctgatggactggccgttctaggtatttttttgaaggttggcagcgctaaaccgggccttcagaaagttgttgatgtgctggattccattaaaacaaagggcaagagtgctgacttcactaacttcgatcctcgtggcctccttcctgaatccctggattactggacctacccaggctcactgaccacccctcctcttctggaatgtgtgacctggattgtgctcaaggaacccatcagcgtcagcagcgagcaggtgttgaaattccgtaaacttaacttcaatggggagggtgaacccgaagaactgatggtggacaactggcgcccagctcagccactgaagaacaggcaaatcaaagcttccttcaaataagatggtcccatagtctgtatccaaataatgaatcttcgggtgtttccctttagctaagcacagatctaccttggtgatttggaccctggttgctttgtgtctagttttctagacccttcatctcttacttgatagacttactaataaaatgtgaagactagaccaattgtcatgcttgacacaactgctgtggctggttggtgctttgtttatggtagtagtttttctgtaacacagaatataggataagaaataagaataaagtaccttgactttgttcacagcatgtagggtgatgagcactcacaattgttgactaaaatgctgcttttaaaacataggaaagtagaatggttgagtgcaaatccatagcacaagataaattgagctagttaaggcaaatcaggtaaaatagtcatgattctatgtaatgtaaaccagaaaaaataaatgttcatgatttcaagatgttatattaaagaaaaactttaaaaattattatatatttatagcaaagttatcttaaatatgaattctgttgtaatttaatgacttttgaattacagagatataaatgaagtattatctgtaaaaattgttataattagagttgtgatacagagtatatttccattcagacaatatatcataacttaataaatattgtattttagatatattctctaataaaattcagaattct

SEQ ID NO: 80 - protein, 260 aa, Homo sapiens
MSHHWGYGKHNGPEHWHKDFPIAKGERQSPVDIDTHTAKYDPSLKPLSVSYDQATSLRILNNGHAFNVEFDDSQDKAVLKGGPLDGTYRLIQFHFHWGSLDGQGSEHTVDKKKYAAELHLVHWNTKYGDFGKAVQQPDGLAVLGIFLKVGSAKPGLQKVVDVLDSIKTKGKSADFTNFDPRGLLPESLDYWTYPGSLTTPPLLECVTWIVLKEPISVSSEQVLKFRKLNFNGEGEPEELMVDNWRPAQPLKNRQIKASFK

SEQ ID NO: 81 - DNA, 1714 bp, Homo sapiens
ggggcattttgtgcctgcctagctatccagacagagcagctaccctcagctctagctgatactacagacagtacaacagatcaagaagtatggcagtgacaactcgtttgacacggttgcacgaaaagatcctgcaaaatcattttggagggaagcggcttagccttctctataagggtagtgtccatggattccgtaatggagttttgcttgacagatgttgtaatcaagggcctactctaacagtgatttatagtgaagatcatattattggagcatatgcggaagagagttaccaggaaggaaagtatgcttccatcatcctttttgcacttcaagatactaaaatttcagaatggaaactaggactatgtacaccagaaacactgttttgttgtgatgttacaaaatataactccccaactaatttccagatagatggaagaaatagaaaagtgattatggacttaaagacaatggaaaatcttggacttgctcaaaattgtactatctctattcaggattatgaagtttttcgatgcgaagattcactggatgaaagaaagataaaaggggtcattgagctcaggaagagcttactgtctgccttgagaacttatgaaccatatggatccctggttcaacaaatacgaattctgctgctgggtccaattggagctgggaagtccagctttttcaactcagtgaggtctgttttccaagggcatgtaacgcatcaggctttggtgggcactaatacaactgggatatctgagaagtataggacatactctattagagacgggaaagatggcaaatacctgccgtttattctgtgtgactcactggggctgagtgagaaagaaggcggcctgtgcagggatgacatattctatatcttgaacggtaacattcgtgatagataccagtttaatcccatggaatcaatcaaattaaatcatcatgactacattgattccccatcgctgaaggacagaattcattgtgtggcatttgtatttgatgccagctctattcaatacttctcctctcagatgatagtaaagatcaaaagaattcgaagggagttggtaaacgctggtgtggtacatgtggctttgctcactcatgtggatagcatggatttgattacaaaaggtgaccttatagaaatagagagatgtgagcctgtgaggtccaagctagaggaagtccaaagaaaacttggatttgctctttctgacatctcggtggttagcaattattcctctgagtgggagctggaccctgtaaaggatgttctaattctttctgctctgagacgaatgctatgggctgcagatgacttcttagaggatttgccttttgagcaaatagggaatctaagggaggaaattatcaactgtgcacaaggaaaaaaatagatatgtgaaaggttcacgtaaatttcctcacatcacagaagattaaaattcagaaaggagaaaacacagaccaaagagaagtatctaagaccaaagggatgtgttttattaatgtctaggatgaagaaatgcatagaacattgtagtacttgtaaataactagaaataacatgatttagtcataattgtgaaaaatagtaataatttttcttggatttatgttctgtatctgtgaaaaaataaatttcttataaaactcggaaaaaaaaaaaaaaaaaaaaaaaaaaaaa

SEQ ID NO: 82 - protein, 444 aa, Homo sapiens
MAVTTRLTRLHEKILQNHFGGKRLSLLYKGSVHGFRNGVLLDRCCNQGPTLTVIYSEDHIIGAYAEESYQEGKYASIILFALQDTKISEWKLGLCTPETLFCCDVTKYNSPTNFQIDGRNRKVIMDLKTMENLGLAQNCTISIQDYEVFRCEDSLDERKIKGVIELRKSLLSALRTYEPYGSLVQQIRILLLGPIGAGKSSFFNSVRSVFQGHVTHQALVGTNTTGISEKYRTYSIRDGKDGKYLPFILCDSLGLSEKEGGLCRDDIFYILNGNIRDRYQFNPMESIKLNHHDYIDSPSLKDRIHCVAFVFDASSIQYFSSQMIVKIKRIRRELVNAGVVHVALLTHVDSMDLITKGDLIEIERCEPVRSKLEEVQRKLGFALSDISVVSNYSSEWELDPVKDVLILSALRRMLWAADDFLEDLPFEQIGNLREEIINCAQGKK

SEQ ID NO: 83 - DNA, 2750 bp, Homo sapiens
attgtttcctactccattttctctggggcaatagcagaataggagcaagccagcactagtcagctaactaagtgactcaaccaaggccttttttccttgttatctttgcagatacttcattttcttagcgtttctggagattacaacatcctgcggttccgtttctgggaactttactgatttatctcccccctcacacaaataagcattgattcctgcatttctgaagatctcaagatctggactactgttgaaaaaatttccagtgaggctcacttatgtctgtaaagatgggaaaaaaatacaagaacattgttctactaaaaggattagaggtcatcaatgattatcattttagaatggttaagtccttactgagcaacgatttaaaacttaatttaaaaatgagagaagagtatgacaaaattcagattgctgacttgatggaagaaaagttccgaggtgatgctggtttgggcaaactaataaaaattttcgaagatataccaacgcttgaagacctggctgaaactcttaaaaaagaaaagttaaaagtaaaaggaccagccctatcaagaaagaggaagaaggaagtggatgctacttcacctgcaccctccacaagcagcactgtcaaaactgaaggagcagaggcaactcctggagctcagaaaagaaaaaaatcaaccaaagaaaaggctggacccaaagggagtaaggtgtccgaggaacagactcagcctccctctcctgcaggagccggcatgtccacagccatgggccgttccccatctcccaagacctcattgtcagctccacccaacagttcttcaactgagaacccgaaaacagtggccaaatgtcaggtaactcccagaagaaatgttctccaaaaacgcccagtgatagtgaaggtactgagtacaacaaagccatttgaatatgagaccccagaaatggagaaaaaaataatgtttcatgctacagtggctacacagacacagttcttccatgtgaaggttttaaacaccagcttgaaggagaaattcaatggaaagaaaatcatcatcatatcagattatttggaatatgatagtctcctagaggtcaatgaagaatctactgtatctgaagctggtcctaaccaaacgtttgaggttccaaataaaatcatcaacagagcaaaggaaactctgaagattgatattcttcacaaacaagcttcaggaaatattgtatatggggtatttatgctacataagaaaacagtaaatcagaagaccacaatctacgaaattcaggatgatagaggaaaaatggatgtagtggggacaggacaatgtcacaatatcccctgtgaagaaggagataagctccaacttttctgctttcgacttagaaaaaagaaccagatgtcaaaactgatttcagaaatgcatagttttatccagataaagaaaaaaacaaacccgagaaacaatgaccccaagagcatgaagctaccccaggaacagcgtcagcttccatatccttcagaggccagcacaaccttccctgagagccatcttcggactcctcagatgccaccaacaactccatccagcagtttcttcaccaagaaaagtgaagacacaatctccaaaatgaatgacttcatgaggatgcagatactgaaggaagggagtcattttccaggaccgttcatgaccagcataggcccagctgagagccatccccacactcctcagatgcctccatcaacaccaagcagcagtttcttaaccacgttgaaaccaagactgaagactgaacctgaagaagtttccatagaagacagtgcccagagtgacctcaaagaagtgatggtgctgaacgcaacagaatcatttgtatatgagcccaaagagcagaagaaaatgtttcatgccacagtggcaactgagaatgaagtcttccgagtgaaggtttttaatattgacctaaaggagaagttcaccccaaagaagatcattgccatagcaaattatgtttgccgcaatgggttcctggaggtatatcctttcacacttgtggctgatgtgaatgctgaccgaaacatggagatcccaaaaggattgattagaagtgccagcgtaactcctaaaatcaatcagctttgctcacaaactaaaggaagttttgtgaatggggtgtttgaggtacataagaaaaatgtaaggggtgaattcacttattatgaaatacaagataatacagggaagatggaagtggtggtgcatggacgactgaccacaatcaactgtgaggaaggagataaactgaaactcacctgctttgaattggcaccgaaaagtgggaataccggggagttgagatctgtaattcatagtcacatcaaggtcatcaagaccaggaaaaacaagaaagacatactcaatcctgattcaagtatggaaacttcaccagactttttcttctaaaatctggatgtcattgacgataatgtttatggagataaggtctaagtgcctaaaaaaatgtacatatacctggttgaaatacaacactatacatacacaccaccatatatactagctgttaatcctatggaatggggtattgggagtgcttttttaatttttcatagtttttttttaataaaatggcatattttgcatctacaacttctataatttgaaaaaataaataaacattatcttttttgtgaaaggaaaaaaaaaaaaaaaaaa

SEQ ID NO: 84 - protein, 729 aa, Homo sapiens
MGKKYKNIVLLKGLEVINDYHFRMVKSLLSNDLKLNLKMREEYDKIQIADLMEEKFRGDAGLGKLIKIFEDIPTLEDLAETLKKEKLKVKGPALSRKRKKEVDATSPAPSTSSTVKTEGAEATPGAQKRKKSTKEKAGPKGSKVSEEQTQPPSPAGAGMSTAMGRSPSPKTSLSAPPNSSSTENPKTVAKCQVTPRRNVLQKRPVIVKVLSTTKPFEYETPEMEKKIMFHATVATQTQFFHVKVLNTSLKEKFNGKKIIIISDYLEYDSLLEVNEESTVSEAGPNQTFEVPNKIINRAKETLKIDILHKQASGNIVYGVFMLHKKTVNQKTTIYEIQDDRGKMDVVGTGQCHNIPCEEGDKLQLFCFRLRKKNQMSKLISEMHSFIQIKKKTNPRNNDPKSMKLPQEQRQLPYPSEASTTFPESHLRTPQMPPTTPSSSFFTKKSEDTISKMNDFMRMQILKEGSHFPGPFMTSIGPAESHPHTPQMPPSTPSSSFLTTLKPRLKTEPEEVSIEDSAQSDLKEVMVLNATESFVYEPKEQKKMFHATVATENEVFRVKVFNIDLKEKFTPKKIIAIANYVCRNGFLEVYPFTLVADVNADRNMEIPKGLIRSASVTPKINQLCSQTKGSFVNGVFEVHKKNVRGEFTYYEIQDNTGKMEVVVHGRLTTINCEEGDKLKLTCFELAPKSGNTGELRSVIHSHIKVIKTRKNKKDILNPDSSMETSPDFFF

SEQ ID NO: 85 - DNA, 2787 bp, Homo sapiens
agagcggaggccgcactccagcactgcgcagggaccgccttggaccgcagttgccggccaggaatcccagtgtcacggtggacacgcctccctcgcgcccttgccgcccacctgctcacccagctcaggggctttggaattctgtggccacactgcgaggagatcggttctgggtcggaggctacaggaagactcccactccctgaaatctggagtgaagaacgccgccatccagccaccattccaaggaggtgcaggagaacagctctgtgataccatttaacttgttgacattacttttatttgaaggaacgtatattagagcttactttgcaaagaaggaagatggttgtttccgaagtggacatcgcaaaagctgatccagctgctgcatcccaccctctattactgaatggagatgctactgtggcccagaaaaatccaggctcggtggctgagaacaacctgtgcagccagtatgaggagaaggtgcgcccctgcatcgacctcattgactccctgcgggctctaggtgtggagcaggacctggccctgccagccatcgccgtcatcggggaccagagctcgggcaagagctccgtgttggaggcactgtcaggagttgcccttcccagaggcagcgggatcgtgaccagatgcccgctggtgctgaaactgaagaaacttgtgaacgaagataagtggagaggcaaggtcagttaccaggactacgagattgagatttcggatgcttcagaggtagaaaaggaaattaataaagcccagaatgccatcgccggggaaggaatgggaatcagtcatgagctaatcaccctggagatcagctcccgagatgtcccggatctgactctaatagaccttcctggcataaccagagtggctgtgggcaatcagcctgctgacattgggtataagatcaagacactcatcaagaagtacatccagaggcaggagacaatcagcctggtggtggtccccagtaatgtggacatcgccaccacagaggctctcagcatggcccaggaggtggaccccgagggagacaggaccatcggaatcttgacgaagcctgatctggtggacaaaggaactgaagacaaggttgtggacgtggtgcggaacctcgtgttccacctgaagaagggttacatgattgtcaagtgccggggccagcaggagatccaggaccagctgagcctgtccgaagccctgcagagagagaagatcttctttgagaaccacccatatttcagggatctgctggaggaaggaaaggccacggttccctgcctggcagaaaaacttaccagcgagctcatcacacatatctgtaaatctctgcccctgttagaaaatcaaatcaaggagactcaccagagaataacagaggagctacaaaagtatggtgtcgacataccggaagacgaaaatgaaaaaatgttcttcctgatagataaaattaatgcctttaatcaggacatcactgctctcatgcaaggagaggaaactgtaggggaggaagacattcggctgtttaccagactccgacacgagttccacaaatggagtacaataattgaaaacaattttcaagaaggccataaaattttgagtagaaaaatccagaaatttgaaaatcagtatcgtggtagagagctgccaggctttgtgaattacaggacatttgagacaatcgtgaaacagcaaatcaaggcactggaagagccggctgtggatatgctacacaccgtgacggatatggtccggcttgctttcacagatgtttcgataaaaaattttgaagagttttttaacctccacagaaccgccaagtccaaaattgaagacattagagcagaacaagagagagaaggtgagaagctgatccgcctccacttccagatggaacagattgtctactgccaggaccaggtatacaggggtgcattgcagaaggtcagagagaaggagctggaagaagaaaagaagaagaaatcctgggattttggggctttccagtccagctcggcaacagactcttccatggaggagatctttcagcacctgatggcctatcaccaggaggccagcaagcgcatctccagccacatccctttgatcatccagttcttcatgctccagacgtacggccagcagcttcagaaggccatgctgcagctcctgcaggacaaggacacctacagctggctcctgaaggagcggagcgacaccagcgacaagcggaagttcctgaaggagcggcttgcacggctgacgcaggctcggcgccggcttgcccagttccccggttaaccacactctgtccagccccgtagacgtgcacgcacactgtctgcccccgttcccgggtagccactggactgacgacttgagtgctcagtagtcagactggatagtccgtctctgcttatccgttagccgtggtgatttagcaggaagctgtgagagcagtttggtttctagcatgaagacagagccccaccctcagatgcacatgagctggcgggattgaaggatgctgtcttcgtactgggaaagggattttcagccctcagaatcgctccaccttgcagctctccccttctctgtattcctagaaactgacacatgctgaacatcacagcttatttcctcatttttataatgtcccttcacaaacccagtgttttaggagcatgagtgccgtgtgtgtgcgtcctgtcggagccctgtctcctctctctgtaataaactcatttctagcag

SEQ ID NO: 86 - protein, 662 aa, Homo sapiens
MVVSEVDIAKADPAAASHPLLLNGDATVAQKNPGSVAENNLCSQYEEKVRPCIDLIDSLRALGVEQDLALPAIAVIGDQSSGKSSVLEALSGVALPRGSGIVTRCPLVLKLKKLVNEDKWRGKVSYQDYEIEISDASEVEKEINKAQNAIAGEGMGISHELITLEISSRDVPDLTLIDLPGITRVAVGNQPADIGYKIKTLIKKYIQRQETISLVVVPSNVDIATTEALSMAQEVDPEGDRTIGILTKPDLVDKGTEDKVVDVVRNLVFHLKKGYMIVKCRGQQEIQDQLSLSEALQREKIFFENHPYFRDLLEEGKATVPCLAEKLTSELITHICKSLPLLENQIKETHQRITEELQKYGVDIPEDENEKMFFLIDKINAFNQDITALMQGEETVGEEDIRLFTRLRHEFHKWSTIIENNFQEGHKILSRKIQKFENQYRGRELPGFVNYRTFETIVKQQIKALEEPAVDMLHTVTDMVRLAFTDVSIKNFEEFFNLHRTAKSKIEDIRAEQEREGEKLIRLHFQMEQIVYCQDQVYRGALQKVREKELEEEKKKKSWDFGAFQSSSATDSSMEEIFQHLMAYHQEASKRISSHIPLIIQFFMLQTYGQQLQKAMLQLLQDKDTYSWLLKERSDTSDKRKFLKERLARLTQARRRLAQFPG

SEQ ID NO: 87 - DNA, 2101 bp, Homo sapiens
agttcgtaaaggagccgggtgacttcagaggcgccggcccgtccgtctgccgcacctgagcacggcccctgcccgagcctggcccgccgcgatgctgtagggaccgccgtgtcctcccgccggaccgttatccgcgccgggcgcccgccagacccgctggcaagatgccgcgctccttcctggtcaagaagcatttcaacgcctccaaaaagccaaactacagcgaactggacacacatacagtgattatttccccgtatctctatgagagttactccatgcctgtcataccacaaccagagatcctcagctcaggagcatacagccccatcactgtgtggactaccgctgctccattccacgcccagctacccaatggcctctctcctctttccggatactcctcatctttggggcgagtgagtccccctcctccatctgacacctcctccaaggaccacagtggctcagaaagccccattagtgatgaagaggaaagactacagtccaagctttcagacccccatgccattgaagctgaaaagtttcagtgcaatttatgcaataagacctattcaactttttctgggctggccaaacataagcagctgcactgcgatgcccagtctagaaaatctttcagctgtaaatactgtgacaaggaatatgtgagcctgggcgccctgaagatgcatattcggacccacacattaccttgtgtttgcaagatctgcggcaaggcgttttccagaccctggttgcttcaaggacacattagaactcacacgggggagaagcctttttcttgccctcactgcaacagagcatttgcagacaggtcaaatctgagggctcatctgcagacccattctgatgtaaagaaataccagtgcaaaaactgctccaaaaccttctccagaatgtctctcctgcacaaacatgaggaatctggctgctgtgtagcacactgagtgacgcaatcaatgtttactcgaacagaatgcatttcttcactccgaagccaaatgacaaataaagtccaaaggcattttctcctgtgctgaccaaccaaataatatgtatagacacacacacatatgcacacacacacacacacacccacagagagagagctgcaagagcatggaattcatgtgtttaaagataatcctttccatgtgaagtttaaaattactatatatttgctgatggctagattgagagaataaaagacagtaacctttctcttcaaagataaaatgaaaagcacattgcatcttttcttcctaaaaaaatgcaaagatttacattgctgccaaatcatttcaactgaaaagaacagtattgctttgtaatagagtctgtaataggatttcccataggaagagatctgccagacgcgaactcaggtgccttaaaaagtattccaagtttactccattacatgtcggttgtctggttgccattgttgaactaaagcctttttttgattacctgtagtgctttaaagtatatttttaaaagggaggaaaaaaataacaagaacaaaacacaggagaatgtattaaaagtatttttgttttgttttgtttttgccaattaacagtatgtgccttgggggaggagggaaagattagctttgaacattcctggcgcatgctccattgtcttactattttaaaacattttaataatttttgaaaattaattaaagatgggaataagtgcaaaagaggattcttacaaattcattaatgtacttaaactatttcaaatgcataccacaaatgcaataatacaataccccttccaagtgcctttttaaattgtatagttgatgagtcaatgtaaatttgtgtttatttttatatgattgaatgagttctgtatgaaactgagatgttgtctatagctatgtctataaacaacctgaagacttgtgaaatcaatgtttcttttttaaaaaacaattttcaagttttttttacaataaacagttttgatttaaaatctcgtttgtatactattttcagagactttacttgcttcatgattagtaccaaaccactgtacaaagaattgtttgttaacaagaaaaaaa

SEQ ID NO: 88 - protein, 268 aa, Homo sapiens
MPRSFLVKKHFNASKKPNYSELDTHTVIISPYLYESYSMPVIPQPEILSSGAYSPITVWTTAAPFHAQLPNGLSPLSGYSSSLGRVSPPPPSDTSSKDHSGSESPISDEEERLQSKLSDPHAIEAEKFQCNLCNKTYSTFSGLAKHKQLHCDAQSRKSFSCKYCDKEYVSLGALKMHIRTHTLPCVCKICGKAFSRPWLLQGHIRTHTGEKPFSCPHCNRAFADRSNLRAHLQTHSDVKKYQCKNCSKTFSRMSLLHKHEESGCCVAH

SEQ ID NO: 89 - DNA, 2704 bp, Homo sapiens
gggagaaacgttctcactcgctctctgctcgctgcgggcgctccccgccctctgctgccagaaccttggggatgtgcctagacccggcgcagcacacgtccgggccaaccgcgagcagaacaaacctttggcgggcggccaggaggctccctcccagccaccgcccccctccagcgcctttttttccccccatacaatacaagatcttccttcctcagttcccttaaagcacagcccagggaaacctcctcacagttttcatccagccacgggccagcatgtctgggggcaaatacgtagactcggagggacatctctacaccgttcccatccgggaacagggcaacatctacaagcccaacaacaaggccatggcagacgagctgagcgagaagcaagtgtacgacgcgcacaccaaggagatcgacctggtcaaccgcgaccctaaacacctcaacgatgacgtggtcaagattgactttgaagatgtgattgcagaaccagaagggacacacagttttgacggcatttggaaggccagcttcaccaccttcactgtgacgaaatactggttttaccgcttgctgtctgccctctttggcatcccgatggcactcatctggggcatttacttcgccattctctctttcctgcacatctgggcagttgtaccatgcattaagagcttcctgattgagattcagtgcatcagccgtgtctattccatctacgtccacaccgtctgtgacccactctttgaagctgttgggaaaatattcagcaatgtccgcatcaacttgcagaaagaaatataaatgacatttcaaggatagaagtatacctgattttttttccttttaattttcctggtgccaatttcaagttccaagttgctaatacagcaacaatttatgaattgaattatcttggttgaaaataaaaagatcactttctcagttttcataagtattatgtctcttctgagctatttcatctatttttggcagtctgaatttttaaaacccatttaaatttttttccttacctttttatttgcatgtggatcaaccatcgctttattggctgagatatgaacatattgttgaaaggtaatttgagagaaatatgaagaactgaggaggaaaaaaaaaaaaaagaaaagaaccaacaacctcaactgcctactccaaaatgttggtcattttatgttaagggaagaattccagggtatggccatggagtgtacaagtatgtgggcagattttcagcaaactcttttcccactgtttaaggagttagtggattactgccattcacttcataatccagtaggatccagtgatccttacaagttagaaaacataatcttctgccttctcatgatccaactaatgccttactcttcttgaaattttaacctatgatattttctgtgcctgaatatttgttatgtagataacaagacctcagtgccttcctgtttttcacattttccttttcaaatagggtctaactcagcaactcgctttaggtcagcagcctccctgaagaccaaaattagaatatccatgacctagttttccatgcgtgtttctgactctgagctacagagtctggtgaagctcacttctgggcttcatctggcaacatctttatccgtagtgggtatggttgacactagcccaatgaaatgaattaaagtggaccaatagggctgagctctctgtgggctggcagtcctggaagccagctttccctgcctctcatcaactgaatgaggtcagcatgtctattcagcttcgtttattttcaagaataatcacgctttcctgaatccaaactaatccatcaccggggtggtttagtggctcaacattgtgttcccatttcagctgatcagtgggcctccaaggaggggctgtaaaatggaggccattgtgtgagcctatcagagttgctgcaaacctgacccctgctcagtaaagcacttgcaaccgtctgttatgctgtgacacatggcccctccccctgccaggagctttggacctaatccaagcatccctttgcccagaaagaagatgggggaggaggcagtaataaaaagattgaagtattttgctggaataagttcaaattcttctgaactcaaactgaggaatttcacctgtaaacctgagtcgtacagaaagctgcctggtatatccaaaagctttttattcctcctgctcatattgtgattctgcctttggggacttttcttaaaccttcagttatgatttttttttcatacacttattggaactctgcttgatttttgcctcttccagtcttcctgacactttaattaccaacctgttacctactttgactttttgcatttaaaacagacactggcatggatatagttttacttttaaactgtgtacataactgaaaatgtgctatactgcatactttttaaatgtaaagatatttttatctttatatgaagaaaatcacttaggaaatggctttgtgattcaatctgtaaactgtgtattccaagacatgtctgttctacatagatgcttagtccctcatgcaaatcaattactggtccaaaagattgctgaaattttatatgcttactgatatattttacaattttttatcatgcatgtcctgtaaaggttacaagcctgcacaataaaaatgtttaacggtt

SEQ ID NO: 90 - protein, 178 aa, Homo sapiens
MSGGKYVDSEGHLYTVPIREQGNIYKPNNKAMADELSEKQVYDAHTKEIDLVNRDPKHLNDDVVKIDFEDVIAEPEGTHSFDGIWKASFTTFTVTKYWFYRLLSALFGIPMALIWGIYFAILSFLHIWAVVPCIKSFLIEIQCISRVYSIYVHTVCDPLFEAVGKIFSNVRINLQKEI

SEQ ID NO: 91 - DNA, 1110 bp, Homo sapiens
gacagagcccgggccacggagctccttgccagctctcctcctcgcacagccgctcgaaccgcctgctgagccccatggcccgcgccacgctctccgccgcccccagcaatccccggctcctgcgggtggcgctgctgctcctgctcctggtggccgccagccggcgcgcagcaggagcgcccctggccactgaactgcgctgccagtgcttgcagaccctgcagggaattcacctcaagaacatccaaagtgtgaaggtgaagtcccccggaccccactgcgcccaaaccgaagtcatagccacactcaagaatgggcagaaagcttgtctcaaccccgcatcgcccatggttaagaaaatcatcgaaaagatgctgaaaaatggcaaatccaactgaccagaaggaaggaggaagcttattggtggctgttcctgaaggaggccctgccttacaggaacagaagaggaaagagagacacagctgcagaggccacctggcttgcgcctaatgtgtttgagcatacttaggagaagtcttctatttatttatttatttatttatttgtttgttttagaagattctatgttaatattttatgtgtaaaataaggttatgattgaatctacttgcacactctcccattatatttattgtttattttaggtcaaacccaagttagttcaatcctgattcatatttaatttgaagatagaaggtttgcagatattctctagtcatttgttaatatttcttcgtgatgacatatcacatgtcagccactgtgatagaggctgaggaatccaagaaaatggccagtaagatcaatgtgacggcagggaaatgtatgtgtgtctattttgtaactgtaaagatgaatgtcagttgttatttattgaaatgatttcacagtgtgtggtcaacatttctcatgttgaagctttaagaactaaaatgttctaaatatcccttggcattttatgtctttcttgtaagatactgccttgtttaatgttaattatgcagtgtttccctctgtgttagagcagagaggtttcgatatttattgatgttttcacaaagaacaggaaaataaaatatttaaaaatat

SEQ ID NO: 92 - protein, 107 aa, Homo sapiens
MARATLSAAPSNPRLLRVALLLLLLVAASRRAAGAPLATELRCQCLQTLQGIHLKNIQSVKVKSPGPHCAQTEVIATLKNGQKACLNPASPMVKKIIEKMLKNGKSN

SEQ ID NO: 93 - DNA, 4628 bp, Homo sapiens
tcacttgcctgatatttccagtgtcagagggacacagccaacgtggggtcccttctaggctgacagccgctctccagccactgccgcgagcccgtctgctcccgccctgcccgtgcactctccgcagccgccctccgccaagccccagcgcccgctcccatcgccgatgaccgcggggaggaggatggagatgctctgtgccggcagggtccctgcgctgctgctctgcctgggtttccatcttctacaggcagtcctcagtacaactgtgattccatcatgtatcccaggagagtccagtgataactgcacagctttagttcagacagaagacaatccacgtgtggctcaagtgtcaataacaaagtgtagctctgacatgaatggctattgtttgcatggacagtgcatctatctggtggacatgagtcaaaactactgcaggtgtgaagtgggttatactggtgtccgatgtgaacacttctttttaaccgtccaccaacctttaagcaaagaatatgtggctttgaccgtgattcttattattttgtttcttatcacagtcgtcggttccacatattatttctgcagatggtacagaaatcgaaaaagtaaagaaccaaagaaggaatatgagagagttacctcaggggatccagagttgccgcaagtctgaatggcgccatcaaacttatgggcagggataacagtgtgcctggttaatattaatattcccattttattaataatatttatgttgggtcaagtgttaggtcaataacactgtattttaatgtacttgaaaaatgtttttatttttgttttatttttgacagactatttgctaatgtataatgtgcagaaaatatttaatatcaaaagaaaattgatatttttatacaagtaatttcctgagctaaatgcttcattgaaagcttcaaagtttatatgcctggtgcacagtgcttagaagtaagcaattcccaggtcatagctcaagaattgttagcaaatgacagatttctgtaagcctatatatatagtcaaatcgatttagtaagtatgttttttatgttcctcaaatcagtgataattggtttgactgtaccatggtttgatatgtagttggcaccatggtatcatatattaaaacaataatgcaattagaatttgggagaagcaaatataggtcctgtgttaaacactacacatttgaaacaagctaaccctggggagtctatggtctcttcactcaggtctcagctataattctgttatatgaggggcagtggacagttccctatgccaactcacgactcctacaggtactagtcactcatctaccagattctgcctatgtaaaatgaattgaaaaacaattttctgtaatcttttatttaagtagtgggcatttcatagcttcacaatgttccttttttgtatattacaacatttatgtgaggtaattattgctcaacagacaattagaaaaaagtccacacttgaagcctaaatttgtgctttttaagaatatttttagactatttctttttataggggctttgctgaattctaacattaaatcacagcccaaaatttgatggactaattattattttaaaatatatgaagacaataattctacatgttgtcttaagatggaaatacagttatttcatcttttattcaaggaagttttaactttaatacagctcagtaaatggcttcttctagaatgtaaagttatgtatttaaagttgtatcttgacacaggaaatgggaaaaaacttaaaaattaatatggtgtatttttccaaatgaaaaatctcaattgaaagcttttaaaatgtagaaacttaaacacaccttcctgtggaggctgagatgaaaactagggctcattttcctgacatttgtttattttttggaagagacaaagatttcttctgcactctgagcccataggtctcagagagttaataggagtatttttgggctattgcataaggagccactgctgccaccacttttggattttatgggaggctccttcatcgaatgctaaacctttgagtagagtctccctggatcacataccaggtcagggaggatctgttcttcctctacgtttatcctggcatgtgctagggtaaacgaaggcataataagccatggctgacctctggagcaccaggtgccaggacttgtctccatgtgtatccatgcattatataccctggtgcaatcacacgactgtcatctaaagtcctggccctggcccttactattaggaaaataaacagacaaaaacaagtaaatatatatggtcatatacatattgtatatatattcatatacaaacatgtatgtatacatgaccttaatggatcatagaattgcagtcatttggtgctctgctaaccatttatataaaacttaaaaacaagagaaaagaaaaatcaattagatctaaacagttatttctgtttcctatttaatacagctgaagtcaaaatatgtaagaacacattttaaatactctacttacagttggccctctgtggttagttccacatctgtggattcaaccaaccaaggacggaaaatgcttaaaaaataatacaacaacaacaaaaaatacattataacaactatttacttttttttttttctttttgagatggagtctcgctctgttgcccaggttggagtgcagtggcacgatctcggctcactgcaacctcacctcccgggttcaagagatcctcctgcctcagcctcctgagcagctgggactacaggcgcatgccaccatgcccagctaatttttgtatttttagtagaggcggggtttcaccatgttggccaggatggtctcaatctcctaaccttgagatccaccctccacagcctcccaaactgctgggattacaggtgtgagccaccgcacgtagcatttacattaggtattacaagtaatgtaaagatgatttaagtatacaggaggatgtgaataggttatatgcaagcactatgcccttttatataagtgacttgaacatctgtgcccgattttagtatgtgcaggggggcgatctgggaatcagtcccctgtggataccaaggtacaactgtatttattaacgcttactagatgtgaggagagtctgaatattttcagtgatcttggctgtttcaaaaaaatctattgacttttcaataaatcagctgcaatccatttatttcatttacaaaagatttattgtaagcatctcaatcttggtttgtcagtttatcttaagcatgtcaattcataaaaacaagtcatttttgtatttttcatctttaagaatgcttaaaaaagctaatccctaaaatagttagatctttgtaaatgcatattaaataataaagtatgacccacattactttttatgggtgaaaataagacaaaaataatagttttagtgaggatggtgctgagtaaacataaaaactgatttgctctcagctgatgtgtcctgtacacagtgggaagattttagttcacacttagtctaactcccccattttacagatttctcactatatatatttctagaaggggctatgcatattcaatgtattgagaaccaaagcaaccacaaatgcataaatgcataatttatggtcttcaaccaaggccacataataacccagttaacttactctttaaccaggaatattaagttctataactagtactcaaggtttaaccttaaaattaagatttccttaaccttaaccttaaaattgatattatattaaacatacataatacaatgtaactccactgttctcctgaatattttttgctctaatctctctgccgaaagtcaaagtgatgggagaattggtatactggtatgactacgtcttaagtcagatttttatttatgagtctttgagactaaattcaatcaccaccaggtatcaaatcaacttttatgcagcaaatatatgattctagtgtctgacttttgttaaattcagtaatgcagtttttaaaaacctgtatctgacccactttgtaatttttgctccaatatccattctgtagacttttgaaaaaaaagtttttaatttgatgcccaatatattctgaccgttaaaaaattcttgttcatatgggagaagggggagtaatgacttgtacaaacagtatttctggtgtatattttaatgtttttaaaaagagtaatttcatttaaatatctgttattcaaatttgatgatgttaaatgtaatataatgtattttctttttattttgcactctgtaattgcactttttaagtttgaagagccattttggtaaacggtttttattaaagatgctatggaacataaagttgtattgcatgcaatttgaagtaacttatttgactatgaatgttatcggattactgaattgtatcaatttgtttgtgttcaatatcagctttgataattgtgtaccttaagatattgaaggagaaaatagataatttacaagatattattaatttttatttatttttcttgggaattgaaaaaaattgaaataaataaaaatgcattgaacatcttgcattcaaaatcttcactgac

SEQ ID NO: 94 - protein, 169 aa, Homo sapiens
MTAGRRMEMLCAGRVPALLLCLGFHLLQAVLSTTVIPSCIPGESSDNCTALVQTEDNPRVAQVSITKCSSDMNGYCLHGQCIYLVDMSQNYCRCEVGYTGVRCEHFFLTVHQPLSKEYVALTVILIILFLITVVGSTYYFCRWYRNRKSKEPKKEYERVTSGDPELPQV

SEQ ID NO: 95 - DNA, 1802 bp, Homo sapiens
gggcagctccaccctgggagggactgtggcccaggtactgcccgggtgctactttatgggcagcagctcagttgagttagagtctggaagacctcagaagacctcctgtcctatgaggccctccccatggctttagagacgatctgccgaccctctgggagaaaatccagcaagatgcaagccttcagaatctgggatgttaaccagaagaccttctatctgaggaacaaccaactagttgctggatacttgcaaggaccaaatgtcaatttagaagaaaagatagatgtggtacccattgagcctcatgctctgttcttgggaatccatggagggaagatgtgcctgtcctgtgtcaagtctggtgatgagaccagactccagctggaggcagttaacatcactgacctgagcgagaacagaaagcaggacaagcgcttcgccttcatccgctcagacagcggccccaccaccagttttgagtctgccgcctgccccggttggttcctctgcacagcgatggaagctgaccagcccgtcagcctcaccaatatgcctgacgaaggcgtcatggtcaccaaattctacttccaggaggacgagtagtactgcccaggcctgcctgttcccattcttgcatggcaaggactgcagggactgccagtccccctgccccagggctcccggctatgggggcactgaggaccagccattgaggggtggaccctcagaaggcgtcacaagaacctggtcacaggactctgcctcctcttcaactgaccagcctccatgctgcctccagaatggtctttctaatgtgtgaatcagagcacagcagcccctgcacaaagcccttccatgtcgcctctgcattcaggatcaaaccccgaccacctgcccaacctgctctcctcttgccactgcctcttcctccctcattccaccttcccatgccctggatccatcaggccacttgatgacccccaaccaagtggctcccacaccctgttttacaaaaaagaaaagaccagtccatgagggaggtttttaagggtttgtggaaaatgaaaattaggatttcatgatttttttttttcagtccccgtgaaggagagcccttcatttggagattatgttctttcggggagaggctgaggacttaaaatattcctgcatttgtgaaatgatggtgaaagtaagtggtagcttttcccttctttttcttctttttttgtgatgtcccaacttgtaaaaattaaaagttatggtactatgttagccccataattttttttttccttttaaaacacttccataatctggactcctctgtccaggcactgctgcccagcctccaagctccatctccactccagattttttacagctgcctgcagtactttacctcctatcagaagtttctcagctcccaaggctctgagcaaatgtggctcctgggggttctttcttcctctgctgaaggaataaattgctccttgacattgtagagcttctggcacttggagacttgtatgaaagatggctgtgcctctgcctgtctcccccaccgggctgggagctctgcagagcaggaaacatgactcgtatatgtctcaggtccctgcagggccaagcacctagcctcgctcttggcaggtactcagcgaatgaatgctgtatatgttgggtgcaaagttccctacttcctgtgacttcagctctgttttacaataaaatcttgaaaatgcctaaaaaaaaaaaaaaaaaaaaaaaaaaaaaaaaaaaaaaaaaaaaaaaaaaaa

SEQ ID NO: 96 - protein, 159 aa, Homo sapiens
MALETICRPSGRKSSKMQAFRIWDVNQKTFYLRNNQLVAGYLQGPNVNLEEKIDVVPIEPHALFLGIHGGKMCLSCVKSGDETRLQLEAVNITDLSENRKQDKRFAFIRSDSGPTTSFESAACPGWFLCTAMEADQPVSLTNMPDEGVMVTKFYFQEDE

SEQ ID NO: 97 - DNA, 6853 bp, Homo sapiens
atacatagacttccgttaaaaccagaatgaggaaaatacttttctctagcatcgtaggaggaagaaaacaaacacatcagatattttcagcactaaaagagatggttttccccacatatatgtaaaagaaatttgcaagactactggattttgatctcatggttgcagtgggtgaataggtggccttttgtgatctcctacatcaccctggaagtgagacttcttcggtttcttctagagtcagtttggtatcagaatggcaaagcaacttaaccttccagaaaatacagatgattggacaaaagaggatgtaaatcagtggttagaaagtcataagattgaccaaaaacacagggaaattttgactgaacaagacgtgaatggagcagtcttgaagtggttaaaaaaagaacatcttgttgatatgggcatcacacatggaccagctattcaaatagaagaactattcaaagaattgcggaaaacagccattgaagattcgattcagacatctaagatgggaaagcccagtaaaaatgctcctaaagaccaaactgtgtctcaaaaggaacgtagagaaacttcaaagcaaaaacaaaagggtaaagagaacccagatatggctaatccgtctgcaatgagtacaactgctaaaggttctaagtcactaaaagttgagctcatagaagataaaatagattatacaaaggaaaggcaaccatccatagacctgacatgtgtatcatatccatttgatgaattcagtaatccatatcgttacaagttggattttagtctacagcctgaaacaggaccaggcaatctcattgatccgatacatgaattcaaagccttcacaaatacagcaacagccacagaagaggatgtcaagatgaaatttagcaatgaggttttccgatttgcttcagcttgtatgaattcacgtaccaatggcactattcattttggagtcaaagacaaaccccatgggaaaattgttggcatcaaagtcaccaatgataccaaggaagccctcattaaccatttcaatctgatgataaacaagtattttgaagaccatcaagtccaacaagcaaagaagtgcattcgagagccaagatttgtggaagttttactgccaaatagtactctatctgacagatttgttattgaagtggacattattccacagttctctgaatgccaatatgattatttccagattaaaatgcaaaattacaacaacaaaatatgggaacaaagtaaaaaattctcactatttgtgcgagatgggaccagctctaaggacattacgaaaaataaagttgatttcagagcatttaaagcagattttaaaacactggcagagtccagaaaagcagcagaagaaaaattcagagcaaaaacaaataaaaaagaaagagagggaccaaagttggttaaattattgacaggaaatcaagatttgttagataattcatactatgaacagtacattcttgtaacaaataaatgccacccagatcaaacaaaacacttagatttcctgaaggaaattaaatggtttgctgtattggagtttgatcctgagtctaacatcaatggagtggtcaaagcttacaaagaaagccgagtagcaaaccttcactttccaagtgtatatgtagaacagaaaaccacaccaaatgagacgatttctactctaaatctttaccatcaacccagctggattttctgcaatggcaggttagaccttgacagtgaaaaatataaaccctttgatccaagttcctggcaaagagaaagagcttctgatgtcaggaaactgatttcatttcttacacatgaagacataatgccaagagggaagtttttggtggtatttctattactgtcctctgtggatgacccaagagatcccctcattgagactttctgtgctttctaccaggatctcaaaggaatggaaaatatactgtgtatttgtgtgcacccacacatatttcagggatggaaagatctacttgaagcaagattaataaaacaccaagatgaaatttcaagccaatgtatttctgctttaagccttgaagagatcaatggcactattcttaaactaaaatctgtgactcaatcttcaaaaaggcttttgccatctattggtttatcgactgtccttctgaaaaaggaagaagatatcatgactgctctggaaattatctgtgaaaatgaatgtgagggtacactgttagagaaggacaaaaataaattccttgaattcaaggcatcaaaagaggaagacttctatcgaggtggcaaagtgtcatggtggaacttctacttctcttctgaaagttattcttcaccttttgtcaaaagggataaatatgaaagacttgaagcaatgattcaaaactgtgcagattcttctaaaccaacaagtaccaaaattattcatctgtatcatcatccaggctgtgggggaactaccttggctatgcacattctctgggaactaaggaagaaattcagatgtgctgtgctgaaaaacaagacagtggatttttctgaaattggagaacaggtaaccagtttaatcacctatggggcaatgaaccgtcaggaatacgtacctgtactactccttgttgatgattttgaagaacaagataatgtctatcttctgcagtactctattcaaacagctatagctaaaaagtacattcgatatgaaaaacctctggtgattatcctaaattgtatgagatcacaaaatcctgaaaaaagtgcaaggatcccagacagtattgccgtaatacagcaactctctcccaaagaacagagagcttttgagcttaaattgaaagaaatcaaagaacagcataaaaactttgaggatttttattcctttatgatcatgaaaaccaattttaataaagaatacatagaaaatgtggtccggaatatcctgaaagggcagaatattttcaccaaggaagcaaagctcttttcttttctggctcttcttaattcatatgtgcctgataccaccatttcactatcacagtgtgaaaaattcttaggaattggaaacaagaaggctttctgggggacagaaaaatttgaagacaagatgggcacctactctacaattctgataaaaacagaggtcatcgaatgtgggaactactgtggagtacgcatcattcactctttgattgcagagttctcactggaagaattgaagaaaagctatcacctgaataaaagtcaaattatgttggatatgctaactgagaatttgttcttcgatactggtatgggaaaaagtaaatttttgcaagatatgcacacactcctactcacaagacaccgcgatgaacatgaaggtgaaacaggaaattggttttccccatttattgaagcattacataaagatgaaggaaatgaagcagttgaagctgtattgcttgaaagtatccatcggttcaacccaaatgcattcatttgccaagcgttggcaagacatttctacattaaaaagaaggactttggcaatgctctaaactgggcaaaacaagcaaaaatcatagaacctgacaattcttatatctcagatacactgggtcaagtctacaaaagtaaaataagatggtggatagaggaaaacggaggaaacgggaacatttcagttgatgatctaattgctcttttggatttagcagaacatgcctcaagtgcattcaaagaatctcaacagcaaagtgaagatagagagtatgaagtgaaggaaagattgtatccgaagtcaaaaaggcggtatgatacttacaatatagctggttatcaaggagagatagaagttgggctttacacaatccaaattctccagctcattcctttttttgataataaaaatgagctatctaaaagatatatggtcaattttgtatcaggaagtagtgatattccaggggatccaaacaatgaatataaattagccctcaaaaactatattccttatttaactaaattgaaattttctttgaaaaagtcctttgatttttttgatgaatactttgtcctgctaaaacccaggaacaatattaagcaaaatgaagaggccaaaactcggagaaaggtggctggatattttaagaaatatgtagatatattttgtctcttagaagaatcacaaaacaacacaggtcttggatcaaagttcagtgagccacttcaagtagagagatgcaggagaaacctagtagctttaaaagcagacaagttttctgggctcttggaatatcttatcaaaagtcaagaggatgctataagcactatgaaatgtatagtgaacgaatatacttttctcttagaacaatgcactgtcaaaatccagtcaaaagaaaagctaaatttcatcttggccaacattattctctcctgtatccaacctacctccagattagtaaagccagttgaaaaactaaaagatcagcttcgagaagtcttgcaaccaataggactgacttatcagttttcagaaccgtattttctagcttccctcttattctggccagaaaatcaacaactagatcaacattctgaacaaatgaaagagtatgctcaagcactaaaaaattctttcaaggggcaatataaacatatgcatcgtacaaagcaaccaattgcatatttctttcttggaaaaggtaaaagactggaaagacttgttcacaaaggaaaaattgaccagtgctttaagaagacaccagatattaattccttgtggcagagtggagatgtgtggaaggaggaaaaagtccaagaacttttgcttcgtttacaaggtcgagctgaaaacaattgtttatatatagaatatggaatcaatgaaaaaatcacaatacccatcactcccgcttttttaggtcaacttagaagtggcagaagcatagagaaggtgtctttttacctgggattttccattggaggcccacttgcttatgacattgaaattgtttaagagcctgatattcttcctccaagaatttgatctcagtacccatttaatttttttggactcaagatctatgctttaaaccggcaaggttatagatacagcctctagctcttcagatctgtacatgcagtatttaatttcctcttaaacatgttatgagttctacaaagacaatagtgaaaaaggaaggagtgagatatatgaaaagtagcaaatatgttccttggtttggttaacatcattgatgacaaaataataaggagctatgactggagtcaggagaagttagtgtaataagctggctacacagaaccccactacttaccaggcatggattgaagaagattgtctactcaaatggcatttagacattagaatgtctgggaaaatatttctcaaagacagcaaaaacctctcaaactgaggagcaacatttattcttactaagcagatcatcaatgtatcatgtgcttggcactcaaggatcttccaaaacagaggaccaaccagtcttctgaaggtcatgcccacagaagtcatcagaccttaccaaagtaggttggagaattagattgccttttcatgcagtgagattcagttaagcaaaaatgaaatttgtctctatagctaattagcttatcaactcccctccaaacaaacaattaaaaaaaaaacatacagacactcaaattccacaagctaatgaacaaaagggactcttgtgagaagactaatgagtccctcatccagaagatgccaatgtactggcagattaacatacaacctatgttttgaacaaaaacaaccagcgatacgtaatcaaaatgtaattttcccctaataaaattatggatatgggcagtcatcaatggctgccaaaaccattaagtggaaagctgattaaaaaacaaaaatttctaatggatttatcaaactgtcccaaatcctgataaatattaacatcacagaggaagaccagacattatgggcctggaagtactataggagtgcacacatcacccgtgacatggtcttgccaaataattaaacctgaatttgatcaggtctctggatcttatttgcaattcaaaagaaattttaaaaaaatcctactaacaccaccacaaatatgcaatcagcaatatccagaaaggggaaattcacaggacaaaaacctggttttcttttttggtttcttcaaccaaaaaagaaagaaattgcaaaggaccaaaaaaatgttggggaatctatacattataagggacttaacaactaaagggcaacatatagactttagatcctaatttgagcaaaatctaaaatcaattattaggcaatcagaaaaatttgaacacagactagatatttgaggatattaaggtactatattattgaagattccatggttatgttttttaaagagttcatgccttttagagatacatactaaagtatttgtaaataaatgacatgatctagaatcagtaattttgtgtttggggtgtgggggtggtgaaagggaagtagaaccgaaacaagattagtcctgagttaacaatggctgcaagctggatacatggaattcagcacacttttctccctcttactgattatgcttttgaaattttctcttgtaaaacatttagaaaacaaaaacaaaaaaaatgtgatttgtttctgtcttcaaaatctcattagaattttttcactggaggaagattttcccttgcttctgcataaaattttaactccataacttataagctcactctttattgttactttctaattgacaaataaaaattgtatattaaaaaaaaaaaaaaaaaa

SEQ ID NO: 98 - protein, 1589 aa, Homo sapiens
MAKQLNLPENTDDWTKEDVNQWLESHKIDQKHREILTEQDVNGAVLKWLKKEHLVDMGITHGPAIQIEELFKELRKTAIEDSIQTSKMGKPSKNAPKDQTVSQKERRETSKQKQKGKENPDMANPSAMSTTAKGSKSLKVELIEDKIDYTKERQPSIDLTCVSYPFDEFSNPYRYKLDFSLQPETGPGNLIDPIHEFKAFTNTATATEEDVKMKFSNEVFRFASACMNSRTNGTIHFGVKDKPHGKIVGIKVTNDTKEALINHFNLMINKYFEDHQVQQAKKCIREPRFVEVLLPNSTLSDRFVIEVDIIPQFSECQYDYFQIKMQNYNNKIWEQSKKFSLFVRDGTSSKDITKNKVDFRAFKADFKTLAESRKAAEEKFRAKTNKKEREGPKLVKLLTGNQDLLDNSYYEQYILVTNKCHPDQTKHLDFLKEIKWFAVLEFDPESNINGVVKAYKESRVANLHFPSVYVEQKTTPNETISTLNLYHQPSWIFCNGRLDLDSEKYKPFDPSSWQRERASDVRKLISFLTHEDIMPRGKFLVVFLLLSSVDDPRDPLIETFCAFYQDLKGMENILCICVHPHIFQGWKDLLEARLIKHQDEISSQCISALSLEEINGTILKLKSVTQSSKRLLPSIGLSTVLLKKEEDIMTALEIICENECEGTLLEKDKNKFLEFKASKEEDFYRGGKVSWWNFYFSSESYSSPFVKRDKYERLEAMIQNCADSSKPTSTKIIHLYHHPGCGGTTLAMHILWELRKKFRCAVLKNKTVDFSEIGEQVTSLITYGAMNRQEYVPVLLLVDDFEEQDNVYLLQYSIQTAIAKKYIRYEKPLVIILNCMRSQNPEKSARIPDSIAVIQQLSPKEQRAFELKLKEIKEQHKNFEDFYSFMIMKTNFNKEYIENVVRNILKGQNIFTKEAKLFSFLALLNSYVPDTTISLSQCEKFLGIGNKKAFWGTEKFEDKMGTYSTILIKTEVIECGNYCGVRIIHSLIAEFSLEELKKSYHLNKSQIMLDMLTENLFFDTGMGKSKFLQDMHTLLLTRHRDEHEGETGNWFSPFIEALHKDEGNEAVEAVLLESIHRFNPNAFICQALARHFYIKKKDFGNALNWAKQAKIIEPDNSYISDTLGQVYKSKIRWWIEENGGNGNISVDDLIALLDLAEHASSAFKESQQQSEDREYEVKERLYPKSKRRYDTYNIAGYQGEIEVGLYTIQILQLIPFFDNKNELSKRYMVNFVSGSSDIPGDPNNEYKLALKNYIPYLTKLKFSLKKSFDFFDEYFVLLKPRNNIKQNEEAKTRRKVAGYFKKYVDIFCLLEESQNNTGLGSKFSEPLQVERCRRNLVALKADKFSGLLEYLIKSQEDAISTMKCIVNEYTFLLEQCTVKIQSKEKLNFILANIILSCIQPTSRLVKPVEKLKDQLREVLQPIGLTYQFSEPYFLASLLFWPENQQLDQHSEQMKEYAQALKNSFKGQYKHMHRTKQPIAYFFLGKGKRLERLVHKGKIDQCFKKTPDINSLWQSGDVWKEEKVQELLLRLQGRAENNCLYIEYGINEKITIPITPAFLGQLRSGRSIEKVSFYLGFSIGGPLAYDIEIV

SEQ ID NO: 99 - DNA, 3981 bp, Homo sapiens
cgacaggggcggctctttcctgggtggggtttgtgaagtcgtggcccgttagcaggaagcctaacagtcgccccgacgctagtgagggacccaatctgagtccccggccagccgaatccaagccgtgtgtactgcgtgctcagcactgcccgacagtcctagctaaacttcgccaactccgctgcctttgccgccaccatgcccaaaacgatcagtgtgcgtgtgaccaccatggatgcagagctggagtttgccatccagcccaacaccaccgggaagcagctatttgaccaggtggtgaaaactattggcttgagggaagtttggttctttggtctgcagtaccaggacactaaaggtttctccacctggctgaaactcaataagaaggtgactgcccaggatgtgcggaaggaaagccccctgctctttaagttccgtgccaagttctaccctgaggatgtgtccgaggaattgattcaggacatcactcagcgcctgttctttctgcaagtgaaagagggcattctcaatgatgatatttactgcccgcctgagaccgctgtgctgctggcctcgtatgctgtccagtctaagtatggcgacttcaataaggaagtgcataagtctggctacctggccggagacaagttgctcccgcagagagtcctggaacagcacaaactcaacaaggaccagtgggaggagcggatccaggtgtggcatgaggaacaccgtggcatgctcagggaggatgctgtcctggaatatctgaagattgctcaagatctggagatgtatggtgtgaactacttcagcatcaagaacaagaaaggctcagagctgtggctgggggtggatgccctgggtctcaacatctatgagcagaatgacagactaactcccaagataggcttcccctggagtgaaatcaggaacatctctttcaatgataagaaatttgtcatcaagcccattgacaaaaaagccccggacttcgtcttctatgctccccggctgcggattaacaagcggatcttggccttgtgcatggggaaccatgaactatacatgcgccgtcgcaagcctgataccattgaggtgcagcagatgaaggcacaggcccgggaggagaagcaccagaagcagatggagcgtgctatgctggaaaatgagaagaagaagcgtgaaatggcagagaaggagaaagagaagattgaacgggagaaggaggagctgatggagaggctgaagcagatcgaggaacagactaagaaggctcagcaagaactggaagaacagacccgtagggctctggaacttgagcaggaacggaagcgtgcccagagcgaggctgaaaagctggccaaggagcgtcaagaagctgaagaggccaaggaggccttgctgcaggcctcccgggaccagaaaaagactcaggaacagctggccttggaaatggcagagctgacagctcgaatctcccagctggagatggcccgacagaagaaggagagtgaggctgtggagtggcagcagaaggcccagatggtacaggaagacttggagaagacccgtgctgagctgaagactgccatgagtacacctcatgtggcagagcctgctgagaatgagcaggatgagcaggatgagaatggggcagaggctagtgctgacctacgggctgatgctatggccaaggaccgcagtgaggaggaacgtaccactgaggcagagaagaatgagcgtgtgcagaagcacctgaaggccctcacttcggagctggccaatgccagagatgagtccaagaagactgccaatgacatgatccatgctgagaacatgcgactgggccgagacaaatacaagaccctgcgccagatccggcagggcaacaccaagcagcgcattgacgaatttgagtctatgtaatgggcacccagcctctagggacccctcctccctttttccttgtccccacactcctacacctaactcacctaactcatactgtgctggagccactaactagagcagccctggagtcatgccaagcatttaatgtagccatgggaccaaacctagccccttagcccccacccacttccctgggcaaatgaatggctcactatggtgccaatggaacctcctttctcttctctgttccattgaatctgtatggctagaatatcctacttctccagcctagaggtactttccacttgattttgcaaatgcccttacacttactgttgtcctatgggagtcaagtgtggagtaggttggaagctagctcccctcctctcccctaccactgtcttcttcagggtcctgagatttacacggttggagtgttatgcggtctagggaatgagacaggacctaggatatcttctccaggatgtcaactgacctaaaatttgccctcccatcccgtttagagttatttaggctttgtaacgattgggggataaaaagatgttcagtcatttttgtttctacctcccagatcggatctgttgcaaactcagcctcaataagccttgtcgttgactttagggactcaatttctccccagggtggatgggggaaatggtgccttcaagaccttcaccaaacatactagaagggcattggccattctattgtggcaaggctgagtagaagatcctaccccaattccttgtaggagtataggccggtctaaagtgagctctatgggcagatctaccccttacttattattccagatctgcagtcacttcgtgggatctgcccctccctgcttcaatacccaaatcctctccagctataacagtagggatgagtacccaaaagctcagccagccccatcaggactcttgtgaaaagagaggatatgttcacacctagcgtcagtattttccctgctaggggttttaggtctcttcccctctcagagctacttgggccatagctcctgctccacagccatcccagccttggcatctagagcttgatgccagtaggctcaactagggagtgagtgcaaaaagctgagtatggtgagagaagcctgtgccctgatccaagtttactcaaccctctcaggtgaccaaaatccccttctcatcactcccctccaaagaggtgactgggccctgcctctgtttgacaaacctctaacccaggtcttgacaccagctgttctgtcccttggagctgtaaaccagagagctgctggggattctggcctagtcccttccacacccccaccccttgctctcaacccaggagcatccacctccttctctgtctcatgtgtgctcttcttctttctacagtattatgtactctactgatatctaaatattgatttctgccttccttgctaatgcaccattagaagatattagtcttggggcaggatgattttggcctcattactttaccacccccacacctggaaagcatatactatattacaaaatgacattttgccaaaattattaatataagaagctttcagtattagtgatgtcatctgtcactataggtcatacaatccattcttaaagtacttgttatttgtttttattattactgtttgtcttctccccagggttcagtcctcaaggggccatcctgtcccaccatgcagtgcccctagcttagagcctccctcaattccccctggccaccaccccccactctgtgcctgaccttgaggagtcttgtgtgcattgctgtgaattagctcacttggtgatatgtcctatattggctaaattgaaacctggaattgtggggcaatctattaatagctgccttaaagtcagtaacttacccttagggaggctgggggaaaaggttagattttgtattcaggggttttttgtgtactttttgggttttttaaaaattgtttttggaggggtttatgctcaatccatgttctatttcagtgccaataaaatttaggaagacttcaaaaaaaaaaaa

SEQ ID NO: 100 - protein, 577 aa, Homo sapiens
MPKTISVRVTTMDAELEFAIQPNTTGKQLFDQVVKTIGLREVWFFGLQYQDTKGFSTWLKLNKKVTAQDVRKESPLLFKFRAKFYPEDVSEELIQDITQRLFFLQVKEGILNDDIYCPPETAVLLASYAVQSKYGDFNKEVHKSGYLAGDKLLPQRVLEQHKLNKDQWEERIQVWHEEHRGMLREDAVLEYLKIAQDLEMYGVNYFSIKNKKGSELWLGVDALGLNIYEQNDRLTPKIGFPWSEIRNISFNDKKFVIKPIDKKAPDFVFYAPRLRINKRILALCMGNHELYMRRRKPDTIEVQQMKAQAREEKHQKQMERAMLENEKKKREMAEKEKEKIEREKEELMERLKQIEEQTKKAQQELEEQTRRALELEQERKRAQSEAEKLAKERQEAEEAKEALLQASRDQKKTQEQLALEMAELTARISQLEMARQKKESEAVEWQQKAQMVQEDLEKTRAELKTAMSTPHVAEPAENEQDEQDENGAEASADLRADAMAKDRSEEERTTEAEKNERVQKHLKALTSELANARDESKKTANDMIHAENMRLGRDKYKTLRQIRQGNTKQRIDEFESM

SEQ ID NO: 101 - DNA, 2406 bp, Homo sapiens
tctctctctgcttctttccttttctctctcatggtagggttatgagtcagttgccaaaaggtggggacatttcctgatgcatttgcaacactgagaagttatcttaagggaggctgggccccattctactcatctggcccagaaagtgaacaccttgggggccactaaggcagccctgctaggggagacgctccaacctgtcttctctctgtctcctggcagctctcttggcctcctagtttctacctaatcatgtccctggtggaggccatcagcctctggaatgaaggggtgctggcagcggacaagaaggactggaagggagccctggatgccttcagtgccgtccaggacccccactcccggatttgcttcaacattggctgcatgtacactatcctgaagaacatgactgaagcagagaaggcctttaccagaagcattaaccgagacaagcacttggcagtggcttacttccaacgagggatgctctactaccagacagagaaatatgatttggctatcaaagaccttaaagaagccttgattcagcttcgagggaaccagctgatagactataagatcctggggctccagttcaagctgtttgcctgtgaggtgttatataacattgctttcatgtatgccaagaaggaggaatggaaaaaagctgaagaacagttagcattggccacgagcatgaagtctgagcccagacattccaaaatcgacaaggcgatggagtgtgtctggaagcagaagctatatgagccagtggtgatccctgtgggcaagctgtttcgaccaaatgagagacaagtggctcagctggccaagaaggattacctaggcaaggcgacggtcgtggcatctgtggtggatcaagacagtttctctgggtttgcccctctgcaaccacaggcagctgagcctccacccagaccgaaaaccccagagatcttcagggctctggaaggggaggctcaccgtgtgctatttgggtttgtgcctgagacaaaagaagagctccaggtcatgccagggaacattgtctttgtcttgaagaagggcaatgataactgggccacggtcatgttcaacgggcagaaggggcttgttccctgcaactaccttgaaccagttgagctgcggatccaccctcagcagcagccccaggaggaaagctctccgcagtccgacatcccagctcctcctagttccaaagcccctggaagaccccagctgtcaccaggccagaaacaaaaagaagagcctaaggaagtgaagctcagtgttcccatgccctacacactcaaggtgcactacaagtacacggtagtcatgaagactcagcccgggctcccctacagccaggtccgggacatggtgtctaagaaactggagctccggctggaacacactaagctgagctatcggcctcgggacagcaatgagctggtgcccctttcagaagacagcatgaaggatgcctggggccaggtgaaaaactactgcctgactctgtggtgtgagaacacagtgggtgaccaaggctttccagatgaacccaaggaaagtgaaaaagctgatgctaataaccagacaacagaacctcagcttaagaaaggcagccaagtggaggcactcttcagttatgaggctacccaaccagaggacctggagtttcaggaaggggatataatcctggtgttatcaaaggtgaatgaagaatggctggaaggggagtgcaaagggaaggtgggcattttccccaaagtttttgttgaagactgcgcaactacagatttggaaagcactcggagagaagtctaggatgtttcacaaactacaaagctgaagaaaatgaagccctattacttgtttgtaagatttagcacccttctgctgtatactgtactgagacattacagtttggaagtgttaactatttattccctgttaaaatttaacctactagacaatgatgtgagtacccaggatgatttcctggggcacagtgggtgaggagatggggacaggtgaatggaggagttaggggagaggaaaagtggatggaagtgtctggaaagggcacgagagagtcttccaggtactgatcctgtttcttgctctgagtgctagctagccagctgtgttcacactgtaaacattcatcaagctgtacatttggtgcacttttctgtgtcataccacaataaaaaaaaacctagcatcttacaaaaacaagacacccaagtccaggcccaaggagtaagtacaaatattcctgtttctgaaccattactgtaattggctcttaaggcttgaagtaaccttataggttactcataaggcatatacaaataaacttgtttgttttcttttttcaaaaaaaaaaaaaaaaaa

SEQ ID NO: 102 - protein, 526 aa, Homo sapiens
MSLVEAISLWNEGVLAADKKDWKGALDAFSAVQDPHSRICFNIGCMYTILKNMTEAEKAFTRSINRDKHLAVAYFQRGMLYYQTEKYDLAIKDLKEALIQLRGNQLIDYKILGLQFKLFACEVLYNIAFMYAKKEEWKKAEEQLALATSMKSEPRHSKIDKAMECVWKQKLYEPVVIPVGKLFRPNERQVAQLAKKDYLGKATVVASVVDQDSFSGFAPLQPQAAEPPPRPKTPEIFRALEGEAHRVLFGFVPETKEELQVMPGNIVFVLKKGNDNWATVMFNGQKGLVPCNYLEPVELRIHPQQQPQEESSPQSDIPAPPSSKAPGRPQLSPGQKQKEEPKEVKLSVPMPYTLKVHYKYTVVMKTQPGLPYSQVRDMVSKKLELRLEHTKLSYRPRDSNELVPLSEDSMKDAWGQVKNYCLTLWCENTVGDQGFPDEPKESEKADANNQTTEPQLKKGSQVEALFSYEATQPEDLEFQEGDIILVLSKVNEEWLEGECKGKVGIFPKVFVEDCATTDLESTRREV

SEQ ID NO: 103 - DNA, 3316 bp, Homo sapiens
gtaggggtaggagggggccggcggagtttccctccccgcccagcggccctgggcgggcttttcggctgcttctcataagcaggtggtttcgtttctccggcacaggtaggtttctctggcaccgattcggggcctgcccggacttcgccgcacgctgcagaacctcgcccagcgcccaccatgccccggcagctcagcgcggcggccgcgctcttcgcgtccctggccgtaattttgcacgatggcagtcaaatgagagcaaaagcatttccagaaaccagagattattctcaacctactgcagcagcaacagtacaggacataaaaaaacctgtccagcaaccagctaagcaagcacctcaccaaactttagcagcaagattcatggatggtcatatcacctttcaaacagcggccacagtaaaaattccaacaactaccccagcaactacaaaaaacactgcaaccaccagcccaattacctacaccctggtcacaacccaggccacacccaacaactcacacacagctcctccagttactgaagttacagtcggccctagcttagccccttattcactgccacccaccatcaccccaccagctcatacaactggaaccagttcatcaaccgtcagccacacaactgggaacaccactcaacccagtaaccagaccacccttccagcaactttatcgatagcactgcacaaaagcacaaccggtcagaagcctgttcaacccacccatgccccaggaacaacggcagctgcccacaataccacccgcacagctgcacctgcctccacggttcctgggcccacccttgcacctcagccatcgtcagtcaagactggaatttatcaggttctaaacggaagcagactctgtataaaagcagagatggggatacagctgattgttcaagacaaggagtcggttttttcacctcggagatacttcaacatcgaccccaacgcaacgcaagcctctgggaactgtggcacccgaaaatccaaccttctgttgaattttcagggcggatttgtgaatctcacatttaccaaggatgaagaatcatattatatcagtgaagtgggagcctatttgaccgtctcagatccagagacaatttaccaaggaatcaaacatgcggtggtgatgttccagacagcagtcgggcattccttcaagtgcgtgagtgaacagagcctccagttgtcagcccacctgcaggtgaaaacaaccgatgtccaacttcaagcctttgattttgaagatgaccactttggaaatgtggatgagtgctcgtctgactacacaattgtgcttcctgtgattggggccatcgtggttggtctctgccttatgggtatgggtgtctataaaatccgcctaaggtgtcaatcatctggataccagagaatctaattgttgcccggggggaatgaaaataatggaatttagagaactctttcatcccttccaggatggatgttgggaaattccctcagagtgtgggtccttcaaacaatgtaaaccaccatcttctattcaaatgaagtgagtcatgtgtgatttaagttcaggcagcacatcaatttctaaatactttttgtttattttatgaaagatatagtgagctgtttattttctagtttcctttagaatattttagccactcaaagtcaacatttgagatatgttgaattaacataatatatgtaaagtagaataagccttcaaattataaaccaagggtcaattgtaactaatactactgtgtgtgcattgaagattttattttacccttgatcttaacaaagcctttgctttgttatcaaatggactttcagtgcttttactatctgtgttttatggtttcatgtaacatacatattcctggtgtagcacttaactccttttccactttaaatttgtttttgttttttgagacggagtttcactcttgtcacccaggctggagtacagtggcacgatctcggcttatggcaacctccgcctcccgggttcaagtgattctcctgcttcagcttcccgagtagctgggattacaggcacacactaccacgcctggctaatttttgtatttttattatagacggggtttcaccatgttggccagactggtcttgaactcttgacctcaggtgatccacccacctcagcctcccaaagtgctgggattacaggcatgagccattgcgcccggccttaaatgttttttttaatcatcaaaaagaacaacatatctcaggttgtctaagtgtttttatgtaaaaccaacaaaaagaacaaatcagcttatattttttatcttgatgactcctgctccagaatcgctagactaagaattaggtggctacagatggtagaactaaacaataagcaagagacaataataatggcccttaattattaacaaagtgccagagtctaggctaagcactttatctatatctcatttcattctcacaacttataggtgaatgagtaaactgagacttaagggaactgaatcacttaaatgtcacctggctaactgatggcagagccagagcttgaattcatgttggtctgacatcaaggtctttggtcttctccctacaccaagttacctacaagaacaatgacaccacactctgcctgaaggctcacacctcataccagcatacgctcaccttacagggaaatgggtttatccaggatcatgagacattagggtagatgaaaggagagctttgcagataacaaaatagcctatccttaataaatcctccactctctggaaggagactgaggggctttgtaaaacattagtcagttgctcatttttatgggattgcttagctgggctgtaaagatgaaggcatcaaataaactcaaagtatttttaaatttttttgataatagagaaacttcgctaaccaactgttctttcttgagtgtatagccccatcttgtggtaacttgctgcttctgcacttcatatccatatttcctattgttcactttattctgtagagcagcctgccaagaattttatttctgctgttttttttgctgctaaagaaaggaactaagtcaggatgttaacagaaaagtccacataaccctagaattcttagtcaaggaataattcaagtcagcctagagaccatgttgactttcctcatgtgtttccttatgactcagtaagttggcaaggtcctgactttagtcttaataaaacattgaattgtagtaaaggtttttgtaataaaaacttactttggaaaaaaaaaaaaaaaaaaaa

SEQ ID NO: 104 - protein, 416 aa, Homo sapiens
MPRQLSAAAALFASLAVILHDGSQMRAKAFPETRDYSQPTAAATVQDIKKPVQQPAKQAPHQTLAARFMDGHITFQTAATVKIPTTTPATTKNTATTSPITYTLVTTQATPNNSHTAPPVTEVTVGPSLAPYSLPPTITPPAHTTGTSSSTVSHTTGNTTQPSNQTTLPATLSIALHKSTTGQKPVQPTHAPGTTAAAHNTTRTAAPASTVPGPTLAPQPSSVKTGIYQVLNGSRLCIKAEMGIQLIVQDKESVFSPRRYFNIDPNATQASGNCGTRKSNLLLNFQGGFVNLTFTKDEESYYISEVGAYLTVSDPETIYQGIKHAVVMFQTAVGHSFKCVSEQSLQLSAHLQVKTTDVQLQAFDFEDDHFGNVDECSSDYTIVLPVIGAIVVGLCLMGMGVYKIRLRCQSSGYQRI

SEQ ID NO: 105 - DNA, 1080 bp, Homo sapiens
ggagaggactggctgggcaggggcgccgccccgcctcgggagaggcgggccgggcggggctgggagtatttgaggctcggagccaccgccccgccggcgcccgcagcacctcctcgccagcagccgtccggagccagccaacgagcggaaaatggcagacaatttttcgctccatgatgcgttatctgggtctggaaacccaaaccctcaaggatggcctggcgcatgggggaaccagcctgctggggcagggggctacccaggggcttcctatcctggggcctaccccgggcaggcacccccaggggcttatcctggacaggcacctccaggcgcctaccctggagcacctggagcttatcccggagcacctgcacctggagtctacccagggccacccagcggccctggggcctacccatcttctggacagccaagtgccaccggagcctaccctgccactggcccctatggcgcccctgctgggccactgattgtgccttataacctgcctttgcctgggggagtggtgcctcgcatgctgataacaattctgggcacggtgaagcccaatgcaaacagaattgctttagatttccaaagagggaatgatgttgccttccactttaacccacgcttcaatgagaacaacaggagagtcattgtttgcaatacaaagctggataataactggggaagggaagaaagacagtcggttttcccatttgaaagtgggaaaccattcaaaatacaagtactggttgaacctgaccacttcaaggttgcagtgaatgatgctcacttgttgcagtacaatcatcgggttaaaaaactcaatgaaatcagcaaactgggaatttctggtgacatagacctcaccagtgcttcatataccatgatataatctgaaaggggcagattaaaaaaaaaaaaagaatctaaaccttacatgtgtaaaggtttcatgttcactgtgagtgaaaatttttacattcatcaatatccctcttgtaagtcatctacttaataaatattacagtgaattacctgtctcaatatgtcaaaaaaaaaaaaaaaaaa

SEQ ID NO: 106 - protein, 250 aa, Homo sapiens
MADNFSLHDALSGSGNPNPQGWPGAWGNQPAGAGGYPGASYPGAYPGQAPPGAYPGQAPPGAYHGAPGAYPGAPAPGVYPGPPSGPGAYPSSGQPSAPGAYPATGPYGAPAGPLIVPYNLPLPGGVVPRMLITILGTVKPNANRIALDFQRGNDVAFHFNPRFNENNRRVIVCNTKLDNNWGREERQSVFPFESGKPFKIQVLVEPDHFKVAVNDAHLLQYNHRVKKLNEISKLGISGDIDLTSASYTMI

SEQ ID NO: 107 - DNA, 1057 bp, Homo sapiens
gtctcagcggctgccaacagatcatgagccatcagctcctctggggccagctataggacaacagaactctcaccaaaggaccagacacagtgagcaccatgggacagtgtcggtcagccaacgcagaggatgctcaggaattcagtgatgtggagagggccattgagaccctcatcaagaactttcaccagtactccgtggagggtgggaaggagacgctgaccccttctgagctacgggacctggtcacccagcagctgccccatctcatgccgagcaactgtggcctggaagagaaaattgccaacctgggcagctgcaatgactctaaactggagttcaggagtttctgggagctgattggagaagcggccaagagtgtgaagctggagaggcctgtccgggggcactgagaactccctctggaattcttggggggtgttggggagagactgtgggcctggagataaaacttgtctcctctaccaccaccctgtaccctagcctgcacctgtcctcatctctgcaaagttcagcttccttccccaggtctctgtgcactctgtcttggatgctctggggagctcatgggtggaggagtctccaccagagggaggctcaggggactggttgggccagggatgaatatttgagggataaaaattgtgtaagagccaaagaattggtagtagggggagaacagagaggagctgggctatgggaaatgatttgaataatggagctgggaatatggctggatatctggtactaaaaaagggtctttaagaacctacttcctaatctcttccccaatccaaaccatagctgtctgtccagtgctctcttcctgcctccagctctgccccaggctcctcctagactctgtccctgggctagggcaggggaggagggagagcagggttgggggagaggctgaggagagtgtgacatgtggggagaggaccagctgggtgcttgggcattgacagaatgatggttgttttgtatcatttgattaataaaaaaaaatgaaaaaagtgaaaaaaaaaaaaaaaaa

SEQ ID NO: 108 - protein, 104 aa, Homo sapiens
MGQCRSANAEDAQEFSDVERAIETLIKNFHQYSVEGGKETLTPSELRDLVTQQLPHLMPSNCGLEEKIANLGSCNDSKLEFRSFWELIGEAAKSVKLERPVRGH

SEQ ID NO: 109 - DNA, 1973 bp, Homo sapiens
gagtgagaagtcttaggaggtaggaggcaggaggaactgaagcccagctgtgaaggccgcagactgcagtgagaggaggctgcactccattttgcaatggcctcccttgctgcagcaaatgcagagttttgcttcaacctgttcagagagatggatgacaatcaaggaaatggaaatgtgttcttttcctctctgagcctcttcgctgccctggccctggtccgcttgggcgctcaagatgactccctctctcagattgataagttgcttcatgttaacactgcctcaggatatggaaactcttctaatagtcagtcagggctccagtctcaactgaaaagagttttttctgatataaatgcatcccacaaggattatgatctcagcattgtgaatgggctttttgctgaaaaagtgtatggctttcataaggactacattgagtgtgccgaaaaattatacgatgccaaagtggagcgagttgactttacgaatcatttagaagacactagacgtaatattaataagtgggttgaaaatgaaacacatggcaaaatcaagaacgtgattggtgaaggtggcataagctcatctgctgtaatggtgctggtgaatgctgtgtacttcaaaggcaagtggcaatcagccttcaccaagagcgaaaccataaattgccatttcaaatctcccaagtgctctgggaaggcagtcgccatgatgcatcaggaacggaagttcaatttgtctgttattgaggacccatcaatgaagattcttgagctcagatacaatggtggcataaacatgtacgttctgctgcctgagaatgacctctctgaaattgaaaacaaactgacctttcagaatctaatggaatggaccaatccaaggcgaatgacctctaagtatgttgaggtattttttcctcagttcaagatagagaagaattatgaaatgaaacaatatttgagagccctagggctgaaagatatctttgatgaatccaaagcagatctctctgggattgcttcggggggtcgtctgtatatatcaaggatgatgcacaaatcttacatagaggtcactgaggagggcaccgaggctactgctgccacaggaagtaatattgtagaaaagcaactccctcagtccacgctgtttagagctgaccacccattcctatttgttatcaggaaggatgacatcatcttattcagtggcaaagtttcttgcccttgaaaatccaattggtttctgttatagcagtccccacaacatcaaagaaccaccacaagtcaatagatttgagtttaattggaaaaatgtggtgtttcctttgagtttatttcttcctaacattggtcagcagatgacactggtgacttgacccttcctagacacctggttgattgtcctgatccctgctcttagcattctaccaccatgtgtctcacccatttctaatttcattgtctttcttcccacgctcatttctatcattctcccccatgacccgtctggaaattatggagagtgctcaactggtaaggagaacgtagaagtagccctagggatcctttttgaaactctacagttatcgcagatattctagcttcattgtaagcaatctaggaaataagccctgctgctttctagaaataagtgtgaaggataaattttctttgttgacctatgaagattttagagtttaccttcatatgtttgattttaaatcagtgtataatctagatggtaaaaaatgtgaaattgggattagggaccaaccaaaatatttcattaatgctttcaattgacaaattttggtctttctttgataagacaatatgtacatagttttttcaaatattaaagatcttttaactgttggcagttgttatctacagaatcatatctcatatgctgtgtagtttataagttttttctctatttatcagaataaagaaatacaacat

SEQ ID NO: 110 - protein, 380 aa, Homo sapiens
MASLAAANAEFCFNLFREMDDNQGNGNVFFSSLSLFAALALVRLGAQDDSLSQIDKLLHVNTASGYGNSSNSQSGLQSQLKRVFSDINASHKDYDLSIVNGLFAEKVYGFHKDYIECAEKLYDAKVERVDFTNHLEDTRRNINKWVENETHGKIKNVIGEGGISSSAVMVLVNAVYFKGKWQSAFTKSETINCHFKSPKCSGKAVAMMHQERKFNLSVIEDPSMKILELRYNGGINMYVLLPENDLSEIENKLTFQNLMEWTNPRRMTSKYVEVFFPQFKIEKNYEMKQYLRALGLKDIFDESKADLSGIASGGRLYISRMMHKSYIEVTEEGTEATAATGSNIVEKQLPQSTLFRADHPFLFVIRKDDIILFSGKVSCP

SEQ ID NO: 111 - DNA, 4987 bp, Homo sapiens
gagtggagttctggaggaatgtttaccagacacagagcccagagggacagcgcccagagcccagatagagagacacggcctcactggctcagcaccagggtccccttccccctcctcagctccctccctggcccctttaagaaagagctgatcctctcctctcttgagttaacccctgattgtccaggtggcccctggctctggcctggtgggcggaggcaaagggggagccaggggcggagaaagggttgcccaagtctgggagtgagggaaggaggcaggggtgctgagaaggcggctgctgggcagagccggtggcaagggcctcccctgccgctgtgccaggcaggcagtgccaaatccggggagcctggagctggggggagggccggggacagcccggccctgccccctcccccgctgggagcccagcaacttctgaggaaagtttggcacccatggcgtggcggtgccccaggatgggcagggtcccgctggcctggtgcttggcgctgtgcggctgggcgtgcatggcccccaggggcacgcaggctgaagaaagtcccttcgtgggcaacccagggaatatcacaggtgcccggggactcacgggcacccttcggtgtcagctccaggttcagggagagccccccgaggtacattggcttcgggatggacagatcctggagctcgcggacagcacccagacccaggtgcccctgggtgaggatgaacaggatgactggatagtggtcagccagctcagaatcacctccctgcagctttccgacacgggacagtaccagtgtttggtgtttctgggacatcagaccttcgtgtcccagcctggctatgttgggctggagggcttgccttacttcctggaggagcccgaagacaggactgtggccgccaacacccccttcaacctgagctgccaagctcagggacccccagagcccgtggacctactctggctccaggatgctgtccccctggccacggctccaggtcacggcccccagcgcagcctgcatgttccagggctgaacaagacatcctctttctcctgcgaagcccataacgccaagggggtcaccacatcccgcacagccaccatcacagtgctcccccagcagccccgtaacctccacctggtctcccgccaacccacggagctggaggtggcttggactccaggcctgagcggcatctaccccctgacccactgcaccctgcaggctgtgctgtcagacgatgggatgggcatccaggcgggagaaccagaccccccagaggagcccctcacctcgcaagcatccgtgcccccccatcagcttcggctaggcagcctccatcctcacaccccttatcacatccgcgtggcatgcaccagcagccagggcccctcatcctggacccactggcttcctgtggagacgccggagggagtgcccctgggcccccctgagaacattagtgctacgcggaatgggagccaggccttcgtgcattggcaagagccccgggcgcccctgcagggtaccctgttagggtaccggctggcgtatcaaggccaggacaccccagaggtgctaatggacatagggctaaggcaagaggtgaccctggagctgcagggggacgggtctgtgtccaatctgacagtgtgtgtggcagcctacactgctgctggggatggaccctggagcctcccagtacccctggaggcctggcgcccagtgaaggaaccttcaactcctgccttctcgtggccctggtggtatgtactgctaggagcagtcgtggccgctgcctgtgtcctcatcttggctctcttccttgtccaccggcgaaagaaggagacccgttatggagaagtgtttgaaccaacagtggaaagaggtgaactggtagtcaggtaccgcgtgcgcaagtcctacagtcgtcggaccactgaagctaccttgaacagcctgggcatcagtgaagagctgaaggagaagctgcgggatgtgatggtggaccggcacaaggtggccctggggaagactctgggagagggagagtttggagctgtgatggaaggccagctcaaccaggacgactccatcctcaaggtggctgtgaagacgatgaagattgccatctgcacgaggtcagagctggaggatttcctgagtgaagcggtctgcatgaaggaatttgaccatcccaacgtcatgaggctcatcggtgtctgtttccagggttctgaacgagagagcttcccagcacctgtggtcatcttacctttcatgaaacatggagacctacacagcttcctcctctattcccggctcggggaccagccagtgtacctgcccactcagatgctagtgaagttcatggcagacatcgccagtggcatggagtatctgagtaccaagagattcatacaccgggacctggcggccaggaactgcatgctgaatgagaacatgtccgtgtgtgtggcggacttcgggctctccaagaagatctacaatggggactactaccgccagggacgtatcgccaagatgccagtcaagtggattgccattgagagtctagctgaccgtgtctacaccagcaagagcgatgtgtggtccttcggggtgacaatgtgggagattgccacaagaggccaaaccccatatccgggcgtggagaacagcgagatttatgactatctgcgccagggaaatcgcctgaagcagcctgcggactgtctggatggactgtatgccttgatgtcgcggtgctgggagctaaatccccaggaccggccaagttttacagagctgcgggaagatttggagaacacactgaaggccttgcctcctgcccaggagcctgacgaaatcctctatgtcaacatggatgagggtggaggttatcctgaaccccctggagctgcaggaggagctgaccccccaacccagccagaccctaaggattcctgtagctgcctcactgcggctgaggtccatcctgctggacgctatgtcctctgcccttccacaacccctagccccgctcagcctgctgataggggctccccagcagccccagggcaggaggatggtgcctgagacaaccctccacctggtactccctctcaggatccaagctaagcactgccactggggaaaactccaccttcccactttcccaccccacgccttatccccacttgcagccctgtcttcctacctatcccacctccatcccagacaggtccctccccttctctgtgcagtagcatcaccttgaaagcagtagcatcaccatctgtaaaaggaaggggttggattgcaatatctgaagccctcccaggtgttaacattccaagactctagagtccaaggtttaaagagtctagattcaaaggttctaggtttcaaagatgctgtgagtctttggttctaaggacctgaaattccaaagtctctaattctattaaagtgctaaggttctaaggcctacttttttttttttttttttttttttttttttttttgcgatagagtctcactgtgtcacccaggctggagtgcagtggtgcaatctcgcctcactgcaaccttcacctaccgagttcaagtgattttcctgccttggcctcccaagtagctgggattacaggtgtgtgccaccacacccggctaatttttatatttttagtagagacagggtttcaccatgttggccaggctggtctaaaactcctgacctcaagtgatctgcccacctcagcctcccaaagtgctgagattacaggcatgagccactgcactcaaccttaagacctactgttctaaagctctgacattatgtggttttagattttctggttctaacatttttgataaagcctcaaggttttaggttctaaagttctaagattctgattttaggagctaaggctctatgagtctagatgtttattcttctagagttcagagtccttaaaatgtaagattatagattctaaagattctatagttctagacatggaggttctaaggcctaggattctaaaatgtgatgttctaaggctctgagagtctagattctctggctgtaaggctctagatcataaggcttcaaaatgttatcttctcaagttctaagattctaatgatgatcaattatagtttctgaggctttatgataatagattctcttgtataagatcctagatcctaagggtcgaaagctctagaatctgcaattcaaaagttccaagagtctaaagatggagtttctaaggtccggtgttctaagatgtgatattctaagacttactctaagatcttagattctctgtgtctaagattctagatcagatgctccaagattctagatgattaaataagattctaacggtctgttctgtttcaaggcactctagattccattggtccaagattccggatcctaagcatctaagttataagactctcacactcagttgtgactaactagacaccaaagttctaataatttctaatgttggacacctttaggttctttgctgcattctgcctctctaggaccatggttaagagtccaagaatccacatttctaaaatcttatagttctaggcactgtagttctaagactcaaatgttctaagtttctaagattctaaaggtccacaggtctagactattaggtgcaatttcaaggttctaaccctatactgtagtattctttggggtgcccctctccttcttagctatcattgcttcctcctccccaactgtgggggtgtgcccccttcaagcctgtgcaatgcattagggatgcctcctttcccgcaggggatggacgatctcccacctttcgggccatgttgcccccgtgagccaatccctcaccttctgagtacagagtgtggactctggtgcctccagaggggctcaggtcacataaaactttgtatatcaacgaaaaaaa

SEQ ID NO: 112 - protein, 885 aa, Homo sapiens
MAWRCPRMGRVPLAWCLALCGWACMAPRGTQAEESPFVGNPGNITGARGLTGTLRCQLQVQGEPPEVHWLRDGQILELADSTQTQVPLGEDEQDDWIVVSQLRITSLQLSDTGQYQCLVFLGHQTFVSQPGYVGLEGLPYFLEEPEDRTVAANTPFNLSCQAQGPPEPVDLLWLQDAVPLATAPGHGPQRSLHVPGLNKTSSFSCEAHNAKGVTTSRTATITVLPQQPRNLHLVSRQPTELEVAWTPGLSGIYPLTHCTLQAVLSDDGMGIQAGEPDPPEEPLTSQASVPPHQLRLGSLHPHTPYHIRVACTSSQGPSSWTHWLPVETPEGVPLGPPENISATRNGSQAFVHWQEPRAPLQGTLLGYRLAYQGQDTPEVLMDIGLRQEVTLELQGDGSVSNLTVCVAAYTAAGDGPWSLPVPLEAWRPVKEPSTPAFSWPWWYVLLGAVVAAACVLILALFLVHRRKKETRYGEVFEPTVERGELVVRYRVRKSYSRRTTEATLNSLGISEELKEKLRDVMVDRHKVALGKTLGEGEFGAVMEGQLNQDDSILKVAVKTMKIAICTRSELEDFLSEAVCMKEFDHPNVMRLIGVCFQGSERESFPAPVVILPFMKHGDLHSFLLYSRLGDQPVYLPTQMLVKFMADIASGMEYLSTKRFIHRDLAARNCMLNENMSVCVADFGLSKKIYNGDYYRQGRIAKMPVKWIAIESLADRVYTSKSDVWSFGVTMWEIATRGQTPYPGVENSEIYDYLRQGNRLKQPADCLDGLYALMSRCWELNPQDRPSFTELREDLENTLKALPPAQEPDEILYVNMDEGGGYPEPPGAAGGADPPTQPDPKDSCSCLTAAEVHPAGRYVLCPSTTPSPAQPADRGSPAAPGQEDGA

SEQ ID NO: 113 - DNA, 1570 bp, Homo sapiens
gccccagggagcagtgggtggttataactcaggcccggtgcccagagcccaggaggaggcagtggccaggaaggcacaggcctgagaagtctgcggctgagctgggagcaaatcccccaccccctacctgggggacagggcaagtgagacctggtgagggtggctcagcaggcagggaaggagaggtgtctgtgcgtcctgcacccacatctttctctgtcccctccttgccctgtctggaggctgctagactcctatcttctgaattctatagtgcctgggtctcagcgcagtgccgatggtggcccgtccttgtggttcctctctacctggggaaataaggtgcagcggccatggctacagcaagacccccctggatgtgggtgctctgtgctctgatcacagccttgcttctgggggtcacagagcatgttctcgccaacaatgatgtttcctgtgaccacccctctaacaccgtgccctctgggagcaaccaggacctgggagctggggccggggaagacgcccggtcggatgacagcagcagccgcatcatcaatggatccgactgcgatatgcacacccagccgtggcaggccgcgctgttgctaaggcccaaccagctctactgcggggcggtgttggtgcatccacagtggctgctcacggccgcccactgcaggaagaaagttttcagagtccgtctcggccactactccctgtcaccagtttatgaatctgggcagcagatgttccagggggtcaaatccatcccccaccctggctactcccaccctggccactctaacgacctcatgctcatcaaactgaacagaagaattcgtcccactaaagatgtcagacccatcaacgtctcctctcattgtccctctgctgggacaaagtgcttggtgtctggctgggggacaaccaagagcccccaagtgcacttccctaaggtcctccagtgcttgaatatcagcgtgctaagtcagaaaaggtgcgaggatgcttacccgagacagatagatgacaccatgttctgcgccggtgacaaagcaggtagagactcctgccagggtgattctggggggcctgtggtctgcaatggctccctgcagggactcgtgtcctggggagattacccttgtgcccggcccaacagaccgggtgtctacacgaacctctgcaagttcaccaagtggatccaggaaaccatccaggccaactcctgagtcatcccaggactcagcacaccggcatccccacctgctgcagggacagccctgacactcctttcagaccctcattccttcccagagatgttgagaatgttcatctctccagcccctgaccccatgtctcctggactcagggtctgcttcccccacattgggctgaccgtgtctctctagttgaaccctgggaacaatttccaaaactgtccagggcgggggttgcgtctcaatctccctggggcactttcatcctcaagctcagggcccatcccttctctgcagctctgacccaaatttagtcccagaaataaactgagaagtggaaaaaaaaa

SEQ ID NO: 114 - protein, 293 aa, Homo sapiens
MATARPPWMWVLCALITALLLGVTEHVLANNDVSCDHPSNTVPSGSNQDLGAGAGEDARSDDSSSRIINGSDCDMHTQPWQAALLLRPNQLYCGAVLVHPQWLLTAAHCRKKVFRVRLGHYSLSPVYESGQQMFQGVKSIPHPGYSHPGHSNDLMLIKLNRRIRPTKDVRPINVSSHCPSAGTKCLVSGWGTTKSPQVHFPKVLQCLNISVLSQKRCEDAYPRQIDDTMFCAGDKAGRDSCQGDSGGPVVCNGSLQGLVSWGDYPCARPNRPGVYTNLCKFTKWIQETIQANS

SEQ ID NO: 115 - DNA, 1454 bp, Homo sapiens
ccactcggccggcagcggagccgcagccaccagccgcccgcgccctccagccccgtccgggagtccccggcccgctgcggtgcctggctgagaactgtgtcttcctggagactaggctggcattttgactttggggttgctgaaaagccaggagtcaaaatgactgagcgctttgactgccaccattgcaacgaatctctctttggcaagaagtacatcctgcgggaggagagcccctactgcgtggtgtgctttgagaccctgttcgccaacacctgcgaggagtgtgggaagcccatcggctgtgactgcaaggacttgtcttacaaggaccggcactggcatgaagcctgtttccactgctcgcagtgcagaaactcactggtggacaagccctttgctgccaaggaggaccagctgctctgtacagactgctattccaacgagtactcatccaagtgccaggaatgcaagaagaccatcatgccaggtacccgcaagatggagtacaagggcagcagctggcatgagacctgcttcatctgccaccgctgccagcagccaattggaaccaagagtttcatccccaaagacaatcagaatttctgtgtgccctgctatgagaaacaacatgccatgcagtgcgttcagtgcaaaaagcccatcaccacgggaggggtcacttaccgggagcagccctggcacaaggagtgcttcgtgtgcaccgcctgcaggaagcagctgtctgggcagcgcttcacagctcgcgatgactttgcctactgcctgaactgcttctgtgacttgtatgccaagaagtgtgctgggtgcaccaaccccatcagcggacttggtggcacaaaatacatctcctttgaggaacggcagtggcataacgactgctttaactgtaagaagtgctccctctcactggtggggcgtggcttcctcacagagagggacgacatcctgtgccccgactgtgggaaagacatctgaattcaacacagagaagttgctgcttgtgatctcacacacagatttttatgttttctttctcacccaggcaatcttgccttctggtttcttccagccacattgagactttcttctagtgcttttcagtgatactcacgtttgcttaaaccctttagtgctttgtgatagttcagtcccagggaaagagaaaactcgccctaggccctaggtgggaagatggtttgaaatttttgtaatcgagtaaggcacacccaaatgtaaaaatccttttgaatgatgcctttataaatctttctctcactgtctatttaagtgcaattaacatatgtcacgaacttgaaagttttctaaactcaataaggtaatgaccagttgttatttacagctctgtaacctcccgttgcgtcaagtctaaaccaagattatgtgacttgcaataaagttattcagaacag

SEQ ID NO: 116 - protein, 279 aa, Homo sapiens
MTERFDCHHCNESLFGKKYILREESPYCVVCFETLFANTCEECGKPIGCDCKDLSYKDRHWHEACFHCSQCRNSLVDKPFAAKEDQLLCTDCYSNEYSSKCQECKKTIMPGTRKMEYKGSSWHETCFICHRCQQPIGTKSFIPKDNQNFCVPCYEKQHAMQCVQCKKPITTGGVTYREQPWHKECFVCTACRKQLSGQRFTARDDFAYCLNCFCDLYAKKCAGCTNPISGLGGTKYISFEERQWHNDCFNCKKCSLSLVGRGFLTERDDILCPDCGKDI

SEQ ID NO: 117 - DNA, 2819 bp, Homo sapiens
gctgcggagggtgcgtgcgggccgcggcagccgaacaaaggagcaggggcgccgccgcagggacccgccacccacctcccggggccgcgcagcggcctctcgtctactgccaccatgaccgccaacggcacagccgaggcggtgcagatccagttcggcctcatcaactgcggcaacaagtacctgacggccgaggcgttcgggttcaaggtgaacgcgtccgccagcagcctgaagaagaagcagatctggacgctggagcagccccctgacgaggcgggcagcgcggccgtgtgcctgcgcagccacctgggccgctacctggcggcggacaaggacggcaacgtgacctgcgagcgcgaggtgcccggtcccgactgccgtttcctcatcgtggcgcacgacgacggtcgctggtcgctgcagtccgaggcgcaccggcgctacttcggcggcaccgaggaccgcctgtcctgcttcgcgcagacggtgtcccccgccgagaagtggagcgtgcacatcgccatgcaccctcaggtcaacatctacagcgtcacccgtaagcgctacgcgcacctgagcgcgcggccggccgacgagatcgccgtggaccgcgacgtgccctggggcgtcgactcgctcatcaccctcgccttccaggaccagcgctacagcgtgcagaccgccgaccaccgcttcctgcgccacgacgggcgcctggtggcgcgccccgagccggccactggctacacgctggagttccgctccggcaaggtggccttccgcgactgcgagggccgttacctggcgccgtcggggcccagcggcacgctcaaggcgggcaaggccaccaaggtgggcaaggacgagctctttgctctggagcagagctgcgcccaggtcgtgctgcaggcggccaacgagaggaacgtgtccacgcgccagggtatggacctgtctgccaatcaggacgaggagaccgaccaggagaccttccagctggagatcgaccgcgacaccaaaaagtgtgccttccgtacccacacgggcaagtactggacgctgacggccaccgggggcgtgcagtccaccgcctccagcaagaatgccagctgctactttgacatcgagtggcgtgaccggcgcatcacactgagggcgtccaatggcaagtttgtgacctccaagaagaatgggcagctggccgcctcggtggagacagcaggggactcagagctcttcctcatgaagctcatcaaccgccccatcatcgtgttccgcggggagcatggcttcatcggctgccgcaaggtcacgggcaccctggacgccaaccgctccagctatgacgtcttccagctggagttcaacgatggcgcctacaacatcaaagactccacaggcaaatactggacggtgggcagtgactccgcggtcaccagcagcggcgacactcctgtggacttcttcttcgagttctgcgactataacaaggtggccatcaaggtgggcgggcgctacctgaagggcgaccacgcaggcgtcctgaaggcctcggcggaaaccgtggaccccgcctcgctctgggagtactagggccggcccgtccttccccgcccctgcccacatggcggctcctgccaaccctccctgctaaccccttctccgccaggtgggctccagggcgggaggcaagcccccttgcctttcaaactggaaaccccagagaaaacggtgcccccacctgtcgcccctatggactccccactctcccctccgcccgggttccctactcccctcgggtcagcggctgcggcctggccctgggagggatttcagatgcccctgccctcttgtctgccacggggcgagtctggcacctctttcttctgacctcagacggctctgagccttatttctctggaagcggctaagggacggttgggggctgggagccctgggcgtgtagtgtaactggaatcttttgcctctcccagccacctcctcccagccccccaggagagctgggcacatgtcccaagcctgtcagtggccctccctggtgcactgtccccgaaacccctgcttgggaagggaagctgtcgggtgggctaggactgacccttgtggtgtttttttgggtggtggctggaaacagcccctctcccacgtggcagaggctcagcctggctcccttccctggagcggcagggcgtgacggccacagggtctgcccgctgcacgttctgccaaggtggtggtggcgggcgggtaggggtgtgggggccgtcttcctcctgtctctttcctttcaccctagcctgactggaagcagaaaatgaccaaatcagtattttttttaatgaaatattattgctggaggcgtcccaggcaagcctggctgtagtagcgagtgatctggcggggggcgtctcagcaccctccccagggggtgcatctcagccccctctttccgtccttcccgtccagccccagccctgggcctgggctgccgacacctgggccagagcccctgctgtgattggtgctccctgggcctcccgggtggatgaagccaggcgtcgccccctccgggagccctggggtgagccgccggggcccccctgctgccagcctcccccgtccccaacatgcatctcactctgggtgtcttggtcttttattttttgtaagtgtcatttgtataactctaaacgcccatgatagtagcttcaaactggaaatagcgaaataaaataactcagtctgcagccccaaaaaaaaaaaaaaaaaaaaaaaaaaaaaaaaaaaaaaaaaaa

SEQ ID NO: 118 - protein, 493 aa, Homo sapiens
MTANGTAEAVQIQFGLINCGNKYLTAEAFGFKVNASASSLKKKQIWTLEQPPDEAGSAAVCLRSHLGRYLAADKDGNVTCEREVPGPDCRFLIVAHDDGRWSLQSEAHRRYFGGTEDRLSCFAQTVSPAEKWSVHIAMHPQVNIYSVTRKRYAHLSARPADEIAVDRDVPWGVDSLITLAFQDQRYSVQTADHRFLRHDGRLVARPEPATGYTLEFRSGKVAFRDCEGRYLAPSGPSGTLKAGKATKVGKDELFALEQSCAQVVLQAANERNVSTRQGMDLSANQDEETDQETFQLEIDRDTKKCAFRTHTGKYWTLTATGGVQSTASSKNASCYFDIEWRDRRITLRASNGKFVTSKKNGQLAASVETAGDSELFLMKLINRPIIVFRGEHGFIGCRKVTGTLDANRSSYDVFQLEFNDGAYNIKDSTGKYWTVGSDSAVTSSGDTPVDFFFEFCDYNKVAIKVGGRYLKGDHAGVLKASAETVDPASLWEY

SEQ ID NO: 119 - DNA, 2561 bp, Homo sapiens
attcatatcatttttcttctccggccccatggaggaagtgagaaagttggcacagtcacgccgggcttcgcaggaccaggtcactcagtgacagatggacaatgcaagaatgaactccttcctggaataccccatacttagcagtggcgactcggggacctgctcagcccgagcctacccctcggaccataggattacaactttccagtcgtgcgcggtcagcgccaacagttgcggcggcgacgaccgcttcctagtgggcaggggggtgcagatcggttcgccccaccaccaccaccaccaccaccatcaccacccccagccggctacctaccagacttccgggaacctgggggtgtcctactcccactcaagttgtggtccaagctatggctcacagaacttcagtgcgccttacagcccctacgcgttaaatcaggaagcagacgtaagtggtgggtacccccagtgcgctcccgctgtttactctggaaatctctcatctcccatggtccagcatcaccaccaccaccagggttatgctgggggcgcggtgggctcgcctcaatacattcaccactcatatggacaggagcaccagagcctggccctggctacgtataataactccttgtcccctctccacgccagccaccaagaagcctgtcgctcccccgcatcggagacatcttctccagcgcagacttttgactggatgaaagtcaaaagaaaccctcccaaaacagggaaagttggagagtacggctacctgggtcaacccaacgcggtgcgcaccaacttcactaccaagcagctcacggaactggagaaggagttccacttcaacaagtacctgacgcgcgcccgcagggtggagatcgctgcatccctgcagctcaacgagacccaagtgaagatctggttccagaaccgccgaatgaagcaaaagaaacgtgagaaggagggtctcttgcccatctctccggccaccccgccaggaaacgacgagaaggccgaggaatcctcagagaagtccagctcttcgccctgcgttccttccccggggtcttctacctcagacactctgactacctcccactgaggcggctccagccccagacaacagcccaggcatctccttgggctgggacttcttacccaaagcacatgcttagcttatctttctttccatttacagtctctttcttcctttctaatcctatctggggagctcctggccaggataatatatttgcagataattctggaccagagacttggtgcggggttaacaccttcatccagattgggtgccagcatacattttctggtgggccttaacatccctcctgcttttaggagaattcacagaacctactgttcctttcagatgaccttttggaaaatagttccctttgccaacagaaacatgccagaaggaatcttctcatcttttatctaactatatgtacagctctcccctcccttgtccttgaaagtaggatatagcgaaaggcgagtccaggagctcaggaagaagagatgcactatatgtttacacaattaattcatcccttaatttaagtcattttcatgtgtgtgagtttgctggttgtaaatactttgtcctaagagatttatctttatacagattttctagaaatgtttaggttactaaaacagggtgggcaaactctctaaactggtacaattttataggtgaaagaaaaaattccctcatttaaacccaatcagatgcctcagagggtagccttgatttgttcttacagttaagaagccctgcagagcacaaacttcagaaacccggcttcctgtgctaagtctttcccaatctctacccctttcttctcgggccaccctctgtttaaaatttgtgctgggttattcagaacctaaaagtattattcaaaccaatttcttccttccacagttatcttagctggatataatgtattttcagctcaattgttaatgtgatggatggcacaatgaatgtatattttgtgttattcgtgaatagtcttttgcatgtcgcacaatgtttgatgtccccaaagtaccacactgagttctatcagttatcctttgtgagcctatgatattccccatttcctgtacaatcatgaacagctctgagatcctggagtgatatgatccagagcagagtttacgggtcttaggatgtctgtaataaataaatatactcaagtttcaggtatgcttaagcatccgtgtatttggctgggctacaatttgttaattcctatgaagttggcacatttcatgaggggaaagggagaagggtggtaaatattttcaaagagatgggccttttcttgaataaaagttaataacagctcctttattataatcaaagctcataatggaaaaaaagactgatgaagaaatttatgaagcagatttatttttgaaacaaacatggatacttcctgggtcaagtgctaaccttttcacctccaactggatgttgacgtatatataaacagaactcccttcaaaagccaaaaaaaaaaaaaaaa

SEQ ID NO: 120 - protein, 335 aa, Homo sapiens
MDNARMNSFLEYPILSSGDSGTCSARAYPSDHRITTFQSCAVSANSCGGDDRFLVGRGVQIGSPHHHHHHHHHHPQPATYQTSGNLGVSYSHSSCGPSYGSQNFSAPYSPYALNQEADVSGGYPQCAPAVYSGNLSSPMVQHHHHHQGYAGGAVGSPQYIHHSYGQEHQSLALATYNNSLSPLHASHQEACRSPASETSSPAQTFDWMKVKRNPPKTGKVGEYGYLGQPNAVRTNFTTKQLTELEKEFHFNKYLTRARRVEIAASLQLNETQVKIWFQNRRMKQKKREKEGLLPISPATPPGNDEKAEESSEKSSSSPCVPSPGSSTSDTLTTSH

SEQ ID NO: 121 - DNA, 1575 bp, Homo sapiens
tcccttctgaggaaacgaaaccaacagcagtccaagctcagtcagcagaagagataaaagcaaacaggtctgggaggcagttctgttgccactctctctcctgtcaatgatggatctcagaaataccccagccaaatctctggacaagttcattgaagactatctcttgccagacacgtgtttccgcatgcaaatcaaccatgccattgacatcatctgtgggttcctgaaggaaaggtgcttccgaggtagctcctaccctgtgtgtgtgtccaaggtggtaaagggtggctcctcaggcaagggcaccaccctcagaggccgatctgacgctgacctggttgtcttcctcagtcctctcaccacttttcaggatcagttaaatcgccggggagagttcatccaggaaattaggagacagctggaagcctgtcaaagagagagagcattttccgtgaagtttgaggtccaggctccacgctggggcaacccccgtgcgctcagcttcgtactgagttcgctccagctcggggagggggtggagttcgatgtgctgcctgcctttgatgccctgggtcagttgactggcggctataaacctaacccccaaatctatgtcaagctcatcgaggagtgcaccgacctgcagaaagagggcgagttctccacctgcttcacagaactacagagagacttcctgaagcagcgccccaccaagctcaagagcctcatccgcctagtcaagcactggtaccaaaattgtaagaagaagcttgggaagctgccacctcagtatgccctggagctcctgacggtctatgcttgggagcgagggagcatgaaaacacatttcaacacagcccagggatttcggacggtcttggaattagtcataaactaccagcaactctgcatctactggacaaagtattatgactttaaaaaccccattattgaaaagtacctgagaaggcagctcacgaaacccaggcctgtgatcctggacccggcggaccctacaggaaacttgggtggtggagacccaaagggttggaggcagctggcacaagaggctgaggcctggctgaattacccatgctttaagaattgggatgggtccccagtgagctcctggattctgctgacccagcacactccaggcagcatccaccccacaggcagaagaggactggacctgcaccatcctctgaatgccagtgcatcttgggggaaagggctccagtgttatctggaccagttccttcattttcaggtgggactcttgatccagagaggacaaagctcctcagtgagctggtgtataatccaggacagaacccaggtctcctgactcctggccttctatgccctctatcctatcatagataacattctccacagcctcacttcattccacctattctctgaaaatattccctgagagagaacagagagatttagataagagaatgaaattccagccttgactttcttctgtgcacctgatgggagggtaatgtctaatgtattatcaataacaataaaaataaagcaaataccatttaaaaaaaaaaa

SEQ ID NO: 122 - protein, 414 aa, Homo sapiens
MMDLRNTPAKSLDKFIEDYLLPDTCFRMQINHAIDIICGFLKERCFRGSSYPVCVSKVVKGGSSGKGTTLRGRSDADLVVFLSPLTTFQDQLNRRGEFIQEIRRQLEACQRERAFSVKFEVQAPRWGNPRALSFVLSSLQLGEGVEFDVLPAFDALGQLTGGYKPNPQIYVKLIEECTDLQKEGEFSTCFTELQRDFLKQRPTKLKSLIRLVKHWYQNCKKKLGKLPPQYALELLTVYAWERGSMKTHFNTAQGFRTVLELVINYQQLCIYWTKYYDFKNPIIEKYLRRQLTKPRPVILDPADPTGNLGGGDPKGWRQLAQEAEAWLNYPCFKNWDGSPVSSWILLTQHTPGSIHPTGRRGLDLHHPLNASASWGKGLQCYLDQFLHFQVGLLIQRGQSSSVSWCIIQDRTQVS

SEQ ID NO: 123 - DNA, 1815 bp, Homo sapiens
gcagagctctgtgctccctgcagtcaggactctgggaccgcagggggctcccggaccctgactctgcagccgaaccggcacggtttcgtggggacccaggcttgcaaagtgacggtcattttctctttctttctccctcttgagtccttctgagatgatggctctgggcgcagcgggagctacccgggtctttgtcgcgatggtagcggcggctctcggcggccaccctctgctgggagtgagcgccaccttgaactcggttctcaattccaacgctatcaagaacctgcccccaccgctgggcggcgctgcggggcacccaggctctgcagtcagcgccgcgccgggaatcctgtacccgggcgggaataagtaccagaccattgacaactaccagccgtacccgtgcgcagaggacgaggagtgcggcactgatgagtactgcgctagtcccacccgcggaggggacgcaggcgtgcaaatctgtctcgcctgcaggaagcgccgaaaacgctgcatgcgtcacgctatgtgctgccccgggaattactgcaaaaatggaatatgtgtgtcttctgatcaaaatcatttccgaggagaaattgaggaaaccatcactgaaagctttggtaatgatcatagcaccttggatgggtattccagaagaaccaccttgtcttcaaaaatgtatcacaccaaaggacaagaaggttctgtttgtctccggtcatcagactgtgcctcaggattgtgttgtgctagacacttctggtccaagatctgtaaacctgtcctgaaagaaggtcaagtgtgtaccaagcataggagaaaaggctctcatggactagaaatattccagcgttgttactgtggagaaggtctgtcttgccggatacagaaagatcaccatcaagccagtaattcttctaggcttcacacttgtcagagacactaaaccagctatccaaatgcagtgaactccttttatataatagatgctatgaaaaccttttatgaccttcatcaactcaatcctaaggatatacaagttctgtggtttcagttaagcattccaataacaccttccaaaaacctggagtgtaagagctttgtttctttatggaactcccctgtgattgcagtaaattactgtattgtaaattctcagtgtggcacttacctgtaaatgcaatgaaacttttaattatttttctaaaggtgctgcactgcctatttttcctcttgttatgtaaatttttgtacacattgattgttatcttgactgacaaatattctatattgaactgaagtaaatcatttcagcttatagttcttaaaagcataaccctttaccccatttaattctagagtctagaacgcaaggatctcttggaatgacaaatgataggtacctaaaatgtaacatgaaaatactagcttattttctgaaatgtactatcttaatgcttaaattatatttccctttaggctgtgatagtttttgaaataaaatttaacatttaatatcatgaaatgttataagtagacatacattttgggattgtgatcttagaggtttgtgtgtgtgtacgtatgtgtgtgttctacaagaacggaagtgtgatatgtttaaagatgatcagagaaaagacagtgtctaaatataagacaatattgatcagctctagaataactttaaagaaagacgtgttctgcattgataaactcaaatgatcatggcagaatgagagtgaatcttacattactactttcaaaaatagtttccaataaattaataatacctaaaaaaaaaaa

SEQ ID NO: 124 - protein, 266 aa, Homo sapiens
MMALGAAGATRVFVAMVAAALGGHPLLGVSATLNSVLNSNAIKNLPPPLGGAAGHPGSAVSAAPGILYPGGNKYQTIDNYQPYPCAEDEECGTDEYCASPTRGGDAGVQICLACRKRRKRCMRHAMCCPGNYCKNGICVSSDQNHFRGEIEETITESFGNDHSTLDGYSRRTTLSSKMYHTKGQEGSVCLRSSDCASGLCCARHFWSKICKPVLKEGQVCTKHRRKGSHGLEIFQRCYCGEGLSCRIQKDHHQASNSSRLHTCQRH

SEQ ID NO: 125 - DNA, 1203 bp, Homo sapiens
agaaagccgcgcacctcctcccgccaggcgctttctcggacgccttgcccagcgggccgcccgaccccctgcaccatggaccccgctcgccccctggggctgtcgattctgctgcttttcctgacggaggctgcactgggcgatgctgctcaggagccaacaggaaataacgcggagatctgtctcctgcccctagactacggaccctgccgggccctacttctccgttactactacgacaggtacacgcagagctgccgccagttcctgtacgggggctgcgagggcaacgccaacaatttctacacctgggaggcttgcgacgatgcttgctggaggatagaaaaagttcccaaagtttgccggctgcaagtgagtgtggacgaccagtgtgaggggtccacagaaaagtatttctttaatctaagttccatgacatgtgaaaaattcttttccggtgggtgtcaccggaaccggattgagaacaggtttccagatgaagctacttgtatgggcttctgcgcaccaaagaaaattccatcattttgctacagtccaaaagatgagggactgtgctctgccaatgtgactcgctattattttaatccaagatacagaacctgtgatgctttcacctatactggctgtggagggaatgacaataactttgttagcagggaggattgcaaacgtgcatgtgcaaaagctttgaaaaagaaaaagaagatgccaaagcttcgctttgccagtagaatccggaaaattcggaagaagcaattttaaacattcttaatatgtcatcttgtttgtctttatggcttatttgcctttatggttgtatctgaagaataatatgacagcatgaggaaacaaatcattggtgatttattcaccagtttttattaatacaagtcactttttcaaaaatttggatttttttatatataactagctgctattcaaatgtgagtctaccatttttaatttatggttcaactgtttgtgagactgaattcttgcaatgcataagatataaaagcaaatatgactcactcatttcttggggtcgtattcctgatttcagaagaggatcataactgaaacaacataagacaatataatcatgtgcttttaacatatttgagaataaaaaggactagcaaataaaacacaaaaaaaaaaaaaaaaaaaaaaaaaaaaaaa

SEQ ID NO: 126 - protein, 235 aa, Homo sapiens
MDPARPLGLSILLLFLTEAALGDAAQEPTGNNAEICLLPLDYGPCRALLLRYYYDRYTQSCRQFLYGGCEGNANNFYTWEACDDACWRIEKVPKVCRLQVSVDDQCEGSTEKYFFNLSSMTCEKFFSGGCHRNRIENRFPDEATCMGFCAPKKIPSFCYSPKDEGLCSANVTRYYFNPRYRTCDAFTYTGCGGNDNNFVSREDCKRACAKALKKKKKMPKLRFASRIRKIRKKQF

SEQ ID NO: 127 - DNA, 2175 bp, Homo sapiens
agtacagtataaaacttcacagtgccaataccatgaagaggagctcagacagctcttaccacatgatacaagagccggctggtggaagagtggggaccagaaagagaatttgctgaagaggagaaggaaaaaaaaaacaccaaaaaaaaaaataaaaaaatccacacacacaaaaaaacctgcgcgtgaggggggaggaaaagcagggccttttaaaaaggcaatcacaacaacttttgctgccaggatgcccttgctttggctgagaggatttctgttggcaagttgctggattatagtgaggagttcccccaccccaggatccgaggggcacagcgcggcccccgactgtccgtcctgtgcgctggccgccctcccaaaggatgtacccaactctcagccagagatggtggaggccgtcaagaagcacattttaaacatgctgcacttgaagaagagacccgatgtcacccagccggtacccaaggcggcgcttctgaacgcgatcagaaagcttcatgtgggcaaagtcggggagaacgggtatgtggagatagaggatgacattggaaggagggcagaaatgaatgaacttatggagcagacctcggagatcatcacgtttgccgagtcaggaacagccaggaagacgctgcacttcgagatttccaaggaaggcagtgacctgtcagtggtggagcgtgcagaagtctggctcttcctaaaagtccccaaggccaacaggaccaggaccaaagtcaccatccgcctcttccagcagcagaagcacccgcagggcagcttggacacaggggaagaggccgaggaagtgggcttaaagggggagaggagtgaactgttgctctctgaaaaagtagtagacgctcggaagagcacctggcatgtcttccctgtctccagcagcatccagcggttgctggaccagggcaagagctccctggacgttcggattgcctgtgagcagtgccaggagagtggcgccagcttggttctcctgggcaagaagaagaagaaagaagaggagggggaagggaaaaagaagggcggaggtgaaggtggggcaggagcagatgaggaaaaggagcagtcgcacagacctttcctcatgctgcaggcccggcagtctgaagaccaccctcatcgccggcgtcggcggggcttggagtgtgatggcaaggtcaacatctgctgtaagaaacagttctttgtcagtttcaaggacatcggctggaatgactggatcattgctccctctggctatcatgccaactactgcgagggtgagtgcccgagccatatagcaggcacgtccgggtcctcactgtccttccactcaacagtcatcaaccactaccgcatgcggggccatagcccctttgccaacctcaaatcgtgctgtgtgcccaccaagctgagacccatgtccatgttgtactatgatgatggtcaaaacatcatcaaaaaggacattcagaacatgatcgtggaggagtgtgggtgctcatagagttgcccagcccagggggaaagggagcaagagttgtccagagaagacagtggcaaaatgaagaaatttttaaggtttctgagttaaccagaaaaatagaaattaaaaacaaaacaaaaaaaaaaacaaaaaaaaacaaaagtaaattaaaaacaaaacctgatgaaacagatgaaggaagatgtggaaaaaatccttagccagggctcagagatgaagcagtgaaagagacaggaattgggagggaaagggagaatggtgtaccctttatttcttctgaaatcacactgatgacatcagttgtttaaacggggtattgtcctttccccccttgaggttcccttgtgagccttgaatcaaccaatctagtctgcagtagtgtggactagaacaacccaaatagcatctagaaagccatgagtttgaaagggcccatcacaggcactttcctacccaattacccaggtcataaggtatgtctgtgtgacacttatctctgtgtatatcagcatacacacacacacacacacacacacacacacacacaggcatttccacacattacatatatacacatactggtaaaagaacaatcgtgtgcaggtggtcacacttcctttttctgtaccacttttgcaacaaaacaa

SEQ ID NO: 128 - protein, 426 aa, Homo sapiens
MPLLWLRGFLLASCWIIVRSSPTPGSEGHSAAPDCPSCALAALPKDVPNSQPEMVEAVKKHILNMLHLKKRPDVTQPVPKAALLNAIRKLHVGKVGENGYVEIEDDIGRRAEMNELMEQTSEIITFAESGTARKTLHFEISKEGSDLSVVERAEVWLFLKVPKANRTRTKVTIRLFQQQKHPQGSLDTGEEAEEVGLKGERSELLLSEKVVDARKSTWHVFPVSSSIQRLLDQGKSSLDVRIACEQCQESGASLVLLGKKKKKEEEGEGKKKGGGEGGAGADEEKEQSHRPFLMLQARQSEDHPHRRRRRGLECDGKVNICCKKQFFVSFKDIGWNDWIIAPSGYHANYCEGECPSHIAGTSGSSLSFHSTVINHYRMRGHSPFANLKSCCVPTKLRPMSMLYYDDGQNIIKKDIQNMIVEECGCS

SEQ ID NO: 129 - DNA, 3132 bp, Homo sapiens
ctccaggcaacttggggcaagcgtctcagttctcgctctcccttcctcccagcggggtcgccgcagaccccagccctgggagcaccgctctgcagcgcggccggcgggtggagacggttggcccctaaactcgctcgtccagcccaaccgccccggcggcttctcccagccctcgaggctctcctgagcggcctggagaggcgtcgagcgcagcccagcgcccgcctgctcacccgccccggcccgggaagggaattttcggatcctgcgagcccggggcgcccccgcggcctagggcgggcagctcccggggcctggccgagccggtggcgcccgggaggccgcggggacagcacgcagcgcgcgcccttggatgccgtcccgcagcgacgccccggcccgccccgctcctcctcctgcctggctagcctgcctctcatttgggaagttttgtgggttttctttctcctcctccaaccttggcggaggccacgactcaggcgccacagctgggggctagaggccgcggaccatggtgcggggcagccaccgctgaagtcagcaaaaccgagcctggcctgaggcaggctgcgcgggaggccaaagccatggccattgccacgtcgacccagctggcccgggcactgtatgacaacaccgctgagtccccccaggagctgtccttccgccgaggggatgtcctacgggtcctgcagagagagggcgctggtggactggacggctggtgcctctgctccctacacggccagcagggcattgtgcccgccaacagggtgaagctcttgcctgctggcccagcacccaagcccagcctctctcctgcgtccccagcccagcctggctcaccatatccagccccagatcacagcaatgaggaccaggaggtgtatgtggtgccgcccccagctcggccctgtccaacctcaggacctccagctggaccttgcccaccctctcctgacctcatctacaaaatccccagagctagtgggacccagctggctgctcccagagatgccttggaggtctacgatgtgccccccaccgccctccgggtgccctccagtggcccctatgactgccctgcctccttttcccaccctctgacccgggttgccccgcagccccctggagaggatgatgctccctatgatgtgcctctgaccccaaagccacctgcagagctggaaccagatctggagtgggaaggaggccgggagccggggccccccatctatgctgccccctccaacctgaaacgagcgtcagccttactcaatttgtatgaagcacccgaggaactgctggcagacggggagggcgggggcactgatgaggggatctacgatgtgcctctgctggggccagaggctcccccttctccagagccccctggagccttggcctcccatgaccaggacaccctggcccagcttctggccagaagccccccacccccacacaggccccggctcccctcagctgagagcctgtcccgccgccctctgcctgccctgcctgtccctgaggcccccagcccctccccagtgccctctcctgccccaggccggaagggcagcatccaggaccggcctctgcccccacccccaccccgcctgcctggttatggaggccccaaggtcgagggggatccagagggcagggagatggaggatgacccagcaggacaccacaatgagtacgagggcattccgatggccgaggagtatgactatgtccacctgaagggcatggacaaagctcagggatctaggcccccggatcaggcctgcacaggggatcctgaactgcccgagagggggatgccggcgccgcaggaggccctgtccccaggggagccactggttgtgtccaccggagatctgcagctcctgtacttctatgctgggcaatgccagagccactactcagccctgcaggcagccgtggcagccctgatgtccagtacccaggctaatcagcccccgcgccttttcgtgccccacagcaagagggtggtggtggctgctcatcgcctggtgtttgttggggacaccctgggccggctggcagcctctgcccctctgagagcacaggtcagggctgcaggtacagcactgggccaggcattgcgggccactgtgctggctgtcaagggagctgccctgggctacccatccagccctgccatccaagagatggtgcagtgtgtaacagaactggcagggcaggccctgcaattcactaccctgctcactagcctggctccatgaaggtcctttggcacagctctgctcctcccctgcctgccaaagcccccctttaggccttgggtggctggaaggctttgttaagggactaggagaaatgggggtatctttcccctttcctgccctttctgctcatctcaacctctcacagaggtgtcttctccccctaacctacagctttttgtacaagccattttgtgtaaattatttatatttaatattattccctgctttgtcaggagcaggtactaggctctggggcagtgaggaactagatccttctctcctcagcctagggtggaggtcactgcactaccacccacctctggaagactggctgtgaaaagtcaggtggcagaaacctggggccacatagagcctctctcttttcctgtttcttggctctagaagatcagcactgcactgttagctgagagtgcgggcaagacataaactgtccagagtttgaaggttctcggaaagaccggagggcttctccccacagaaggcggagagagctggggctcagacatgggtgtgcaccttaataaaccctgctgtctgcctccctgactctgcttcttgggagcatggtgagcagccctggtgctcagcagccatacctatgggacacacactacgaaaaggatgcctttagggtttgggggagattttactcctttcttcaacaactattcactggacaagttctctgctcccatgacgcgccaggcacagttctgcaagtatattgtgaatgtattgttctagtgggatacacaaataagtcagttaaaatacataaataaaaacataaacctgccataaaaaaaaaaaaaaa

SEQ ID NO: 130 - protein, 561 aa, Homo sapiens
MAIATSTQLARALYDNTAESPQELSFRRGDVLRVLQREGAGGLDGWCLCSLHGQQGIVPANRVKLLPAGPAPKPSLSPASPAQPGSPYPAPDHSNEDQEVYVVPPPARPCPTSGPPAGPCPPSPDLIYKIPRASGTQLAAPRDALEVYDVPPTALRVPSSGPYDCPASFSHPLTRVAPQPPGEDDAPYDVPLTPKPPAELEPDLEWEGGREPGPPIYAAPSNLKRASALLNLYEAPEELLADGEGGGTDEGIYDVPLLGPEAPPSPEPPGALASHDQDTLAQLLARSPPPPHRPRLPSAESLSRRPLPALPVPEAPSPSPVPSPAPGRKGSIQDRPLPPPPPRLPGYGGPKVEGDPEGREMEDDPAGHHNEYEGIPMAEEYDYVHLKGMDKAQGSRPPDQACTGDPELPERGMPAPQEALSPGEPLVVSTGDLQLLYFYAGQCQSHYSALQAAVAALMSSTQANQPPRLFVPHSKRVVVAAHRLVFVGDTLGRLAASAPLRAQVRAAGTALGQALRATVLAVKGAALGYPSSPAIQEMVQCVTELAGQALQFTTLLTSLAP

SEQ ID NO: 131 - DNA, 1254 bp, Homo sapiens
ctcacttggccttacactccgctcggctcaccatgtgtcactctcgcagctgccacccgaccatgaccatcctgcaggccccgaccccggccccctccaccatcccgggaccccggcggggctccggtcctgagatcttcaccttcgaccctctcccggagcccgcagcggcccctgccgggcgccccagcgcctctcgcgggcaccgaaagcgcagccgcagggttctctaccctcgagtggtccggcgccagctgccagtcgaggaaccgaacccagccaaaaggcttctctttctgctgctcaccatcgtcttctgccagatcctgatggctgaagagggtgtgccggcgcccctgcctccagaggacgcccctaacgccgcatccctggcgcccacccctgtgtccgccgtcctcgagccctttaatctgacttcggagccctcggactacgctctggacctcagcactttcctccagcaacacccggccgccttctaactgtgactccccgcactccccaaaaagaatccgaaaaaccacaaagaaacaccaggcgtacctggtgcgcgagagcgtatccccaactgggacttccgaggcaacttgaactcagaacactacagcggagacgccacccggtgcttgaggcgggaccgaggcgcacagagaccgaggcgcatagagaccgaggcacagcccagctggggctaggcccggtgggaaggagagcgtcgttaatttatttcttattgctcctaattaatatttatatgtatttatgtacgtcctcctaggtgatggagatgtgtacgtaatatttattttaacttatgcaagggtgtgagatgttccccctgctgtaaatgcaggtctcttggtatttattgagctttgtgggactggtggaagcaggacacctggaactgcggcaaagtaggagaagaaatggggaggactcgggtgggggaggacgtcccggctgggatgaagtctggtggtgggtcgtaagtttaggaggtgactgcatcctccagcatctcaactccgtctgtctactgtgtgagacttcggcggaccattaggaatgagatccgtgagatccttccatcttcttgaagtcgcctttagggtggctgcgaggtagagggttgggggttggtgggctgtcacggagcgactgtcgagatcgcctagtatgttctgtgaacacaaataaaattgatttactgtctgcaaaaaaaaaaaaaaa

SEQ ID NO: 132 - protein, 156 aa, Homo sapiens
MCHSRSCHPTMTILQAPTPAPSTIPGPRRGSGPEIFTFDPLPEPAAAPAGRPSASRGHRKRSRRVLYPRVVRRQLPVEEPNPAKRLLFLLLTIVFCQILMAEEGVPAPLPPEDAPNAASLAPTPVSPVLEPFNLTSEPSDYALDLSTFLQQHPAAF

SEQ ID NO: 133 - DNA, 6641 bp, Homo sapiens
gccctcgccgcccgcggcgccccgagcgctttgtgagcagatgcggagccgagtggagggcgcgagccagatgcggggcgacagctgacttgctgagaggaggcggggaggcgcggagcgcgcgtgtggtccttgcgccgctgacttctccactggttcctgggcaccgaaagataaacctctcataatgaaggcccccgctgtgcttgcacctggcatcctcgtgctcctgtttaccttggtgcagaggagcaatggggagtgtaaagaggcactagcaaagtccgagatgaatgtgaatatgaagtatcagcttcccaacttcaccgcggaaacacccatccagaatgtcattctacatgagcatcacattttccttggtgccactaactacatttatgttttaaatgaggaagaccttcagaaggttgctgagtacaagactgggcctgtgctggaacacccagattgtttcccatgtcaggactgcagcagcaaagccaatttatcaggaggtgtttggaaagataacatcaacatggctctagttgtcgacacctactatgatgatcaactcattagctgtggcagcgtcaacagagggacctgccagcgacatgtctttccccacaatcatactgctgacatacagtcggaggttcactgcatattctccccacagatagaagagcccagccagtgtcctgactgtgtggtgagcgccctgggagccaaagtcctttcatctgtaaaggaccggttcatcaacttctttgtaggcaataccataaattcttcttatttcccagatcatccattgcattcgatatcagtgagaaggctaaaggaaacgaaagatggttttatgtttttgacggaccagtcctacattgatgttttacctgagttcagagattcttaccccattaagtatgtccatgcctttgaaagcaacaattttatttacttcttgacggtccaaagggaaactctagatgctcagacttttcacacaagaataatcaggttctgttccataaactctggattgcattcctacatggaaatgcctctggagtgtattctcacagaaaagagaaaaaagagatccacaaagaaggaagtgtttaatatacttcaggctgcgtatgtcagcaagcctggggcccagcttgctagacaaataggagccagcctgaatgatgacattcttttcggggtgttcgcacaaagcaagccagattctgccgaaccaatggatcgatctgccatgtgtgcattccctatcaaatatgtcaacgacttcttcaacaagatcgtcaacaaaaacaatgtgagatgtctccagcatttttacggacccaatcatgagcactgctttaataggacacttctgagaaattcatcaggctgtgaagcgcgccgtgatgaatatcgaacagagtttaccacagctttgcagcgcgttgacttattcatgggtcaattcagcgaagtcctcttaacatctatatccaccttcattaaaggagacctcaccatagctaatcttgggacatcagagggtcgcttcatgcaggttgtggtttctcgatcaggaccatcaacccctcatgtgaattttctcctggactcccatccagtgtctccagaagtgattgtggagcatacattaaaccaaaatggctacacactggttatcactgggaagaagatcacgaagatcccattgaatggcttgggctgcagacatttccagtcctgcagtcaatgcctctctgccccaccctttgttcagtgtggctggtgccacgacaaatgtgtgcgatcggaggaatgcctgagcgggacatggactcaacagatctgtctgcctgcaatctacaaggttttcccaaatagtgcaccccttgaaggagggacaaggctgaccatatgtggctgggactttggatttcggaggaataataaatttgatttaaagaaaactagagttctccttggaaatgagagctgcaccttgactttaagtgagagcacgatgaatacattgaaatgcacagttggtcctgccatgaataagcatttcaatatgtccataattatttcaaatggccacgggacaacacaatacagtacattctcctatgtggatcctgtaataacaagtatttcgccgaaatacggtcctatggctggtggcactttacttactttaactggaaattacctaaacagtgggaattctagacacatttcaattggtggaaaaacatgtactttaaaaagtgtgtcaaacagtattcttgaatgttataccccagcccaaaccatttcaactgagtttgctgttaaattgaaaattgacttagccaaccgagagacaagcatcttcagttaccgtgaagatcccattgtctatgaaattcatccaaccaaatcttttattagtggtgggagcacaataacaggtgttgggaaaaacctgaattcagttagtgtcccgagaatggtcataaatgtgcatgaagcaggaaggaactttacagtggcatgtcaacatcgctctaattcagagataatctgttgtaccactccttccctgcaacagctgaatctgcaactccccctgaaaaccaaagcctttttcatgttagatgggatcctttccaaatactttgatctcatttatgtacataatcctgtgtttaagccttttgaaaagccagtgatgatctcaatgggcaatgaaaatgtactggaaattaagggaaatgatattgaccctgaagcagttaaaggtgaagtgttaaaagttggaaataagagctgtgagaatatacacttacattctgaagccgttttatgcacggtccccaatgacctgctgaaattgaacagcgagctaaatatagagtggaagcaagcaatttcttcaaccgtccttggaaaagtaatagttcaaccagatcagaatttcacaggattgattgctggtgttgtctcaatatcaacagcactgttattactacttgggtttttcctgtggctgaaaaagagaaagcaaattaaagatctgggcagtgaattagttcgctacgatgcaagagtacacactcctcatttggataggcttgtaagtgcccgaagtgtaagcccaactacagaaatggtttcaaatgaatctgtagactaccgagctacttttccagaagatcagtttcctaattcatctcagaacggttcatgccgacaagtgcagtatcctctgacagacatgtcccccatcctaactagtggggactctgatatatccagtccattactgcaaaatactgtccacattgacctcagtgctctaaatccagagctggtccaggcagtgcagcatgtagtgattgggcccagtagcctgattgtgcatttcaatgaagtcataggaagagggcattttggttgtgtatatcatgggactttgttggacaatgatggcaagaaaattcactgtgctgtgaaatccttgaacagaatcactgacataggagaagtttcccaatttctgaccgagggaatcatcatgaaagattttagtcatcccaatgtcctctcgctcctgggaatctgcctgcgaagtgaagggtctccgctggtggtcctaccatacatgaaacatggagatcttcgaaatttcattcgaaatgagactcataatccaactgtaaaagatcttattggctttggtcttcaagtagccaaaggcatgaaatatcttgcaagcaaaaagtttgtccacagagacttggctgcaagaaactgtatgctggatgaaaaattcacagtcaaggttgctgattttggtcttgccagagacatgtatgataaagaatactatagtgtacacaacaaaacaggtgcaaagctgccagtgaagtggatggctttggaaagtctgcaaactcaaaagtttaccaccaagtcagatgtgtggtcctttggcgtgctcctctgggagctgatgacaagaggagccccaccttatcctgacgtaaacacctttgatataactgtttacttgttgcaagggagaagactcctacaacccgaatactgcccagaccccttatatgaagtaatgctaaaatgctggcaccctaaagccgaaatgcgcccatccttttctgaactggtgtcccggatatcagcgatcttctctactttcattggggagcactatgtccatgtgaacgctacttatgtgaacgtaaaatgtgtcgctccgtatccttctctgttgtcatcagaagataacgctgatgatgaggtggacacacgaccagcctccttctgggagacatcatagtgctagtactatgtcaaagcaacagtccacactttgtccaatggttttttcactgcctgacctttaaaaggccatcgatattctttgctcttgccaaaattgcactattataggacttgtattgttatttaaattactggattctaaggaatttcttatctgacagagcatcagaaccagaggcttggtcccacaggccacggaccaatggcctgcagccgtgacaacactcctgtcatattggagtccaaaacttgaattctgggttgaattttttaaaaatcaggtaccacttgatttcatatgggaaattgaagcaggaaatattgagggcttcttgatcacagaaaactcagaagagatagtaatgctcaggacaggagcggcagccccagaacaggccactcatttagaattctagtgtttcaaaacacttttgtgtgttgtatggtcaataacatttttcattactgatggtgtcattcacccattaggtaaacattcccttttaaatgtttgtttgttttttgagacaggatctcactctgttgccagggctgtagtgcagtggtgtgatcatagctcactgcaacctccacctcccaggctcaagcctcccgaatagctgggactacaggcgcacaccaccatccccggctaatttttgtattttttgtagagacggggttttgccatgttgccaaggctggtttcaaactcctggactcaagaaatccacccacctcagcctcccaaagtgctaggattacaggcatgagccactgcgcccagcccttataaatttttgtatagacattcctttggttggaagaatatttataggcaatacagtcaaagtttcaaaatagcatcacacaaaacatgtttataaatgaacaggatgtaatgtacatagatgacattaagaaaatttgtatgaaataatttagtcatcatgaaatatttagttgtcatataaaaacccactgtttgagaatgatgctactctgatctaatgaatgtgaacatgtagatgttttgtgtgtatttttttaaatgaaaactcaaaataagacaagtaatttgttgataaatatttttaaagataactcagcatgtttgtaaagcaggatacattttactaaaaggttcattggttccaatcacagctcataggtagagcaaagaaagggtggatggattgaaaagattagcctctgtctcggtggcaggttcccacctcgcaagcaattggaaacaaaacttttggggagttttattttgcattagggtgtgttttatgttaagcaaaacatactttagaaacaaatgaaaaaggcaattgaaaatcccagctatttcacctagatggaatagccaccctgagcagaactttgtgatgcttcattctgtggaattttgtgcttgctactgtatagtgcatgtggtgtaggttactctaactggttttgtcgacgtaaacatttaaagtgttatattttttataaaaatgtttatttttaatgatatgagaaaaattttgttaggccacaaaaacactgcactgtgaacattttagaaaaggtatgtcagactgggattaatgacagcatgattttcaatgactgtaaattgcgataaggaaatgtactgattgccaatacaccccaccctcattacatcatcaggacttgaagccaagggttaacccagcaagctacaaagagggtgtgtcacactgaaactcaatagttgagtttggctgttgttgcaggaaaatgattataactaaaagctctctgatagtgcagagacttaccagaagacacaaggaattgtactgaagagctattacaatccaaatattgccgtttcataaatgtaataagtaatactaattcacagagtattgtaaatggtggatgacaaaagaaaatctgctctgtggaaagaaagaactgtctctaccagggtcaagagcatgaacgcatcaatagaaagaactcggggaaacatcccatcaacaggactacacacttgtatatacattcttgagaacactgcaatgtgaaaatcacgtttgctatttataaacttgtccttagattaatgtgtctggacagattgtgggagtaagtgattcttctaagaattagatacttgtcactgcctatacctgcagctgaactgaatggtacttcgtatgttaatagttgttctgataaatcatgcaattaaagtaaagtgatgcaacatcttgtaaaaaaaaaaaaaaaaaaaa

SEQ ID NO: 134 - protein, 1390 aa, Homo sapiens
MKAPAVLAPGILVLLFTLVQRSNGECKEALAKSEMNVNMKYQLPNFTAETPIQNVILHEHHIFLGATNYIYVLNEEDLQKVAEYKTGPVLEHPDCFPCQDCSSKANLSGGVWKDNINMALVVDTYYDDQLISCGSVNRGTCQRHVFPHNHTADIQSEVHCIFSPQIEEPSQCPDCVVSALGAKVLSSVKDRFINFFVGNTINSSYFPDHPLHSISVRRLKETKDGFMFLTDQSYIDVLPEFRDSYPIKYVHAFESNNFIYFLTVQRETLDAQTFHTRIIRFCSINSGLHSYMEMPLECILTEKRKKRSTKKEVFNILQAAYVSKPGAQLARQIGASLNDDILFGVFAQSKPDSAEPMDRSAMCAFPIKYVNDFFNKIVNKNNVRCLQHFYGPNHEHCFNRTLLRNSSGCEARRDEYRTEFTTALQRVDLFMGQFSEVLLTSISTFIKGDLTIANLGTSEGRFMQVVVSRSGPSTPHVNFLLDSHPVSPEVIVEHTLNQNGYTLVITGKKITKIPLNGLGCRHFQSCSQCLSAPPFVQCGWCHDKCVRSEECLSGTWTQQICLPAIYKVFPNSAPLEGGTRLTICGWDFGFRRNNKFDLKKTRVLLGNESCTLTLSESTMNTLKCTVGPAMNKHFNMSIIISNGHGTTQYSTFSYVDPVITSISPKYGPMAGGTLLTLTGNYLNSGNSRHISIGGKTCTLKSVSNSILECYTPAQTISTEFAVKLKIDLANRETSIFSYREDPIVYEIHPTKSFISGGSTITGVGKNLNSVSVPRMVINVHEAGRNFTVACQHRSNSEIICCTTPSLQQLNLQLPLKTKAFFMLDGILSKYFDLIYVHNPVFKPFEKPVMISMGNENVLEIKGNDIDPEAVKGEVLKVGNKSCENIHLHSEAVLCTVPNDLLKLNSELNIEWKQAISSTVLGKVIVQPDQNFTGLIAGVVSISTALLLLLGFFLWLKKRKQIKDLGSELVRYDARVHTPHLDRLVSARSVSPTTEMVSNESVDYRATFPEDQFPNSSQNGSCRQVQYPLTDMSPILTSGDSDISSPLLQNTVHIDLSALNPELVQAVQHVVIGPSSLIVHFNEVIGRGHFGCVYHGTLLDNDGKKIHCAVKSLNRITDIGEVSQFLTEGIIMKDFSHPNVLSLLGICLRSEGSPLVVLPYMKHGDLRNFIRNETHNPTVKDLIGFGLQVAKGMKYLASKKFVHRDLAARNCMLDEKFTVKVADFGLARDMYDKEYYSVHNKTGAKLPVKWMALESLQTQKFTTKSDVWSFGVLLWELMTRGAPPYPDVNTFDITVYLLQGRRLLQPEYCPDPLYEVMLKCWHPKAEMRPSFSELVSRISAIFSTFIGEHYVHVNATYVNVKCVAPYPSLLSSEDNADDEVDTRPASFWETS

SEQ ID NO: 135 - DNA, 4093 bp, Homo sapiens
cagaggtgaggctgttgtttaaaaacctggagccgggaggggagacccccacattcaagaggagctttcaggcgatctggagaaagaacggcagaacacacagcaaggaaaggtcctttctggggatcaccccattggctgaagatgagaccattcttcctcttgtgttttgccctgcctggcctcctgcatgcccaacaagcctgctcccgtggggcctgctatccacctgttggggacctgcttgttgggaggacccggtttctccgagcttcatctacctgtggactgaccaagcctgagacctactgcacccagtatggcgagtggcagatgaaatgctgcaagtgtgactccaggcagcctcacaactactacagtcaccgagtagagaatgtggcttcatcctccggccccatgcgctggtggcagtcacagaatgatgtgaaccctgtctctctgcagctggacctggacaggagattccagcttcaagaagtcatgatggagttccaggggcccatgcccgccggcatgctgattgagcgctcctcagacttcggtaagacctggcgagtgtaccagtacctggctgccgactgcacctccaccttccctcgggtccgccagggtcggcctcagagctggcaggatgttcggtgccagtccctgcctcagaggcctaatgcacgcctaaatggggggaaggtccaacttaaccttatggatttagtgtctgggattccagcaactcaaagtcaaaaaattcaagaggtgggggagatcacaaacttgagagtcaatttcaccaggctggcccctgtgccccaaaggggctaccaccctcccagcgcctactatgctgtgtcccagctccgtctgcaggggagctgcttctgtcacggccatgctgatcgctgcgcacccaagcctggggcctctgcaggcccctccaccgctgtgcaggtccacgatgtctgtgtctgccagcacaacactgccggcccaaattgtgagcgctgtgcacccttctacaacaaccggccctggagaccggcggagggccaggacgcccatgaatgccaaaggtgcgactgcaatgggcactcagagacatgtcactttgaccccgctgtgtttgccgccagccagggggcatatggaggtgtgtgtgacaattgccgggaccacaccgaaggcaagaactgtgagcggtgtcagctgcactatttccggaaccggcgcccgggagcttccattcaggagacctgcatctcctgcgagtgtgatccggatggggcagtgccaggggctccctgtgacccagtgaccgggcagtgtgtgtgcaaggagcatgtgcagggagagcgctgtgacctatgcaagccgggcttcactggactcacctacgccaacccgcagggctgccaccgctgtgactgcaacatcctggggtcccggagggacatgccgtgtgacgaggagagtgggcgctgcctttgtctgcccaacgtggtgggtcccaaatgtgaccagtgtgctccctaccactggaagctggccagtggccagggctgtgaaccgtgtgcctgcgacccgcacaactccctcagcccacagtgcaaccagttcacagggcagtgcccctgtcgggaaggctttggtggcctgatgtgcagcgctgcagccatccgccagtgtccagaccggacctatggagacgtggccacaggatgccgagcctgtgactgtgatttccggggaacagagggcccgggctgcgacaaggcatcaggccgctgcctctgccgccctggcttgaccgggccccgctgtgaccagtgccagcgaggctactgtaatcgctacccggtgtgcgtggcctgccacccttgcttccagacctatgatgcggacctccgggagcaggccctgcgctttggtagactccgcaatgccaccgccagcctgtggtcagggcctgggctggaggaccgtggcctggcctcccggatcctagatgcaaagagtaagattgagcagatccgagcagttctcagcagccccgcagtcacagagcaggaggtggctcaggtggccagtgccatcctctccctcaggcgaactctccagggcctgcagctggatctgcccctggaggaggagacgttgtcccttccgagagacctggagagtcttgacagaagcttcaatggtctccttactatgtatcagaggaagagggagcagtttgaaaaaataagcagtgctgatccttcaggagccttccggatgctgagcacagcctacgagcagtcagcccaggctgctcagcaggtctccgacagctcgcgccttttggaccagctcagggacagccggagagaggcagagaggctggtgcggcaggcgggaggaggaggaggcaccggcagccccaagcttgtggccctgaggctggagatgtcttcgttgcctgacctgacacccaccttcaacaagctctgtggcaactccaggcagatggcttgcaccccaatatcatgccctggtgagctatgtccccaagacaatggcacagcctgtggctcccgctgcaggggtgtccttcccagggccggtggggccttcttgatggcggggcaggtggctgagcagctgcggggcttcaatgcccagctccagcggaccaggcagatgattagggcagccgaggaatctgcctcacagattcaatccagtgcccagcgcttggagacccaggtgagcgccagccgctcccagatggaggaagatgtcagacgcacacggctcctaatccagcaggtccgggacttcctaacagaccccgacactgatgcagccactatccaggaggtcagcgaggccgtgctggccctgtggctgcccacagactcagctactgttctgcagaagatgaatgagatccaggccattgcagccaggctccccaacgtggacttggtgctgtcccagaccaagcaggacattgcgcgtgcccgccggttgcaggctgaggctgaggaagccaggagccgagcccatgcagtggagggccaggtggaagatgtggttgggaacctgcggcaggggacagtggcactgcaggaagctcaggacaccatgcaaggcaccagccgctcccttcggcttatccaggacagggttgctgaggttcagcaggtactgcggccagcagaaaagctggtgacaagcatgaccaagcagctgggtgacttctggacacggatggaggagctccgccaccaagcccggcagcagggggcagaggcagtccaggcccagcagcttgcggaaggtgccagcgagcaggcattgagtgcccaagagggatttgagagaataaaacaaaagtatgctgagttgaaggaccggttgggtcagagttccatgctgggtgagcagggtgcccggatccagagtgtgaagacagaggcagaggagctgtttggggagaccatggagatgatggacaggatgaaagacatggagttggagctgctgcggggcagccaggccatcatgctgcgctcagcggacctgacaggactggagaagcgtgtggagcagatccgtgaccacatcaatgggcgcgtgctctactatgccacctgcaagtgatgctacagcttccagcccgttgccccactcatctgccgcctttgcttttggttgggggcagattgggttggaatgctttccatctccaggagactttcatgcagcctaaagtacagcctggaccacccctggtgtgtagctagtaagattaccctgagctgcagctgagcctgagccaatgggacagttacacttgacagacaaagatggtggagattggcatgccattgaaactaagagctctcaagtcaaggaagctgggctgggcagtatcccccgcctttagttctccactggggaggaatcctggaccaagcacaaaaacttaacaaaagtgatgtaaaaatgaaaagccaaataaaaatctttggaaaagagcctggaggttcaacgaggaaaaaaaaaaaaaaaaaaaaaaaaaaaaaaaaaa

SEQ ID NO: 136 - protein, 1172 aa, Homo sapiens [sequence omitted]

SEQ ID NO: 137 - DNA, 5101 bp, Homo sapiens
cactcctccccatcctctccctctgtccctctgtccctctgaccctgcactgtcccagcaccatgggacccacctcaggtcccagcctgctgctcctgctactaacccacctccccctggctctggggagtcccatgtactctatcatcacccccaacatcttgcggctggagagcgaggagaccatggtgctggaggcccacgacgcgcaaggggatgttccagtcactgttactgtccacgacttcccaggcaaaaaactagtgctgtccagtgagaagactgtgctgacccctgccaccaaccacatgggcaacgtcaccttcacgatcccagccaacagggagttcaagtcagaaaaggggcgcaacaagttcgtgaccgtgcaggccaccttcgggacccaagtggtggagaaggtggtgctggtcagcctgcagagcgggtacctcttcatccagacagacaagaccatctacacccctggctccacagttctctatcggatcttcaccgtcaaccacaagctgctacccgtgggccggacggtcatggtcaacattgagaacccggaaggcatcccggtcaagcaggactccttgtcttctcagaaccagcttggcgtcttgcccttgtcttgggacattccggaactcgtcaacatgggccagtggaagatccgagcctactatgaaaactcaccacagcaggtcttctccactgagtttgaggtgaaggagtacgtgctgcccagtttcgaggtcatagtggagcctacagagaaattctactacatctataacgagaagggcctggaggtcaccatcaccgccaggttcctctacgggaagaaagtggagggaactgcctttgtcatcttcgggatccaggatggcgaacagaggatttccctgcctgaatccctcaagcgcattccgattgaggatggctcgggggaggttgtgctgagccggaaggtactgctggacggggtgcagaacccccgagcagaagacctggtggggaagtctttgtacgtgtctgccaccgtcatcttgcactcaggcagtgacatggtgcaggcagagcgcagcgggatccccatcgtgacctctccctaccagatccacttcaccaagacacccaagtacttcaaaccaggaatgccctttgacctcatggtgttcgtgacgaaccctgatggctctccagcctaccgagtccccgtggcagtccagggcgaggacactgtgcagtctctaacccagggagatggcgtggccaaactcagcatcaacacacaccccagccagaagcccttgagcatcacggtgcgcacgaagaagcaggagctctcggaggcagagcaggctaccaggaccatgcaggctctgccctacagcaccgtgggcaactccaacaattacctgcatctctcagtgctacgtacagagctcagacccggggagaccctcaacgtcaacttcctcctgcgaatggaccgcgcccacgaggccaagatccgctactacacctacctgatcatgaacaagggcaggctgttgaaggcgggacgccaggtgcgagagcccggccaggacctggtggtgctgcccctgtccatcaccaccgacttcatcccttccttccgcctggtggcgtactacacgctgatcggtgccagcggccagagggaggtggtggccgactccgtgtgggtggacgtcaaggactcctgcgtgggctcgctggtggtaaaaagcggccagtcagaagaccggcagcctgtacctgggcagcagatgaccctgaagatagagggtgaccacggggcccgggtggtactggtggccgtggacaagggcgtgttcgtgctgaataagaagaacaaactgacgcagagtaagatctgggacgtggtggagaaggcagacatcggctgcaccccgggcagtgggaaggattacgccggtgtcttctccgacgcagggctgaccttcacgagcagcagtggccagcagaccgcccagagggcagaacttcagtgcccgcagccagccgcccgccgacgccgttccgtgcagctcacggagaagcgaatggacaaagtcggcaagtaccccaaggagctgcgcaagtgctgcgaggacggcatgcgggagaaccccatgaggttctcgtgccagcgccggacccgtttcatctccctgggcgaggcgtgcaagaaggtcttcctggactgctgcaactacatcacagagctgcggcggcagcacgcgcgggccagccacctgggcctggccaggagtaacctggatgaggacatcattgcagaagagaacatcgtttcccgaagtgagttcccagagagctggctgtggaacgttgaggacttgaaagagccaccgaaaaatggaatctctacgaagctcatgaatatatttttgaaagactccatcaccacgtgggagattctggctgtgagcatgtcggacaagaaagggatctgtgtggcagaccccttcgaggtcacagtaatgcaggacttcttcatcgacctgcggctaccctactctgttgttcgaaacgagcaggtggaaatccgagccgttctctacaattaccggcagaaccaagagctcaaggtgagggtggaactactccacaatccagccttctgcagcctggccaccaccaagaggcgtcaccagcagaccgtaaccatcccccccaagtcctcgttgtccgttccatatgtcatcgtgccgctaaagaccggcctgcaggaagtggaagtcaaggctgctgtctaccatcatttcatcagtgacggtgtcaggaagtccctgaaggtcgtgccggaaggaatcagaatgaacaaaactgtggctgttcgcaccctggatccagaacgcctgggccgtgaaggagtgcagaaagaggacatcccacctgcagacctcagtgaccaagtcccggacaccgagtctgagaccagaattctcctgcaagggaccccagtggcccagatgacagaggatgccgtcgacgcggaacggctgaagcacctcattgtgaccccctcgggctgcggggaacagaacatgatcggcatgacgcccacggtcatcgctgtgcattacctggatgaaacggagcagtgggagaagttcggcctagagaagcggcagggggccttggagctcatcaagaaggggtacacccagcagctggccttcagacaacccagctctgcctttgcggccttcgtgaaacgggcacccagcacctggctgaccgcctacgtggtcaaggtcttctctctggctgtcaacctcatcgccatcgactcccaagtcctctgcggggctgttaaatggctgatcctggagaagcagaagcccgacggggtcttccaggaggatgcgcccgtgatacaccaagaaatgattggtggattacggaacaacaacgagaaagacatggccctcacggcctttgttctcatctcgctgcaggaggctaaagatatttgcgaggagcaggtcaacagcctgccaggcagcatcactaaagcaggagacttccttgaagccaactacatgaacctacagagatcctacactgtggccattgctggctatgctctggcccagatgggcaggctgaaggggcctcttcttaacaaatttctgaccacagccaaagataagaaccgctgggaggaccctggtaagcagctctacaacgtggaggccacatcctatgccctcttggccctactgcagctaaaagactttgactttgtgcctcccgtcgtgcgttggctcaatgaacagagatactacggtggtggctatggctctacccaggccaccttcatggtgttccaagccttggctcaataccaaaaggacgcccctgaccaccaggaactgaaccttgatgtgtccctccaactgcccagccgcagctccaagatcacccaccgtatccactgggaatctgccagcctcctgcgatcagaagagaccaaggaaaatgagggtttcacagtcacagctgaaggaaaaggccaaggcaccttgtcggtggtgacaatgtaccatgctaaggccaaagatcaactcacctgtaataaattcgacctcaaggtcaccataaaaccagcaccggaaacagaaaagaggcctcaggatgccaagaacactatgatccttgagatctgtaccaggtaccggggagaccaggatgccactatgtctatattggacatatccatgatgactggctttgctccagacacagatgacctgaagcagctggccaatggtgttgacagatacatctccaagtatgagctggacaaagccttctccgataggaacaccctcatcatctacctggacaaggtctcacactctgaggatgactgtctagctttcaaagttcaccaatactttaatgtagagcttatccagcctggagcagtcaaggtctacgcctattacaacctggaggaaagctgtacccggttctaccatccggaaaaggaggatggaaagctgaacaagctctgccgtgatgaactgtgccgctgtgctgaggagaattgcttcatacaaaagtcggatgacaaggtcaccctggaagaacggctggacaaggcctgtgagccaggagtggactatgtgtacaagacccgactggtcaaggttcagctgtccaatgactttgacgagtacatcatggccattgagcagaccatcaagtcaggctcggatgaggtgcaggttggacagcagcgcacgttcatcagccccatcaagtgcagagaagccctgaagctggaggagaagaaacactacctcatgtggggtctctcctccgatttctggggagagaagcccaacctcagctacatcatcgggaaggacacttgggtggagcactggcccgaggaggacgaatgccaagacgaagagaaccagaaacaatgccaggacctcggcgccttcaccgagagcatggttgtctttgggtgccccaactgaccacacccccattcccccactccagataaagcttcagttatatctca

SEQ ID NO: 138 - protein, 1663 aa, Homo sapiens
MGPTSGPSLLLLLLTHLPLALGSPMYSIITPNILRLESEETMVLEAHDAQGDVPVTVTVHDFPGKKLVLSSEKTVLTPATNHMGNVTFTIPANREFKSEKGRNKFVTVQATFGTQVVEKVVLVSLQSGYLFIQTDKTIYTPGSTVLYRIFTVNHKLLPVGRTVMVNIENPEGIPVKQDSLSSQNQLGVLPLSWDIPELVNMGQWKIRAYYENSPQQVFSTEFEVKEYVLPSFEVIVEPTEKFYYIYNEKGLEVTITARFLYGKKVEGTAFVIFGIQDGEQRISLPESLKRIPIEDGSGEVVLSRKVLLDGVQNLRAEDLVGKSLYVSATVILHSGSDMVQAERSGIPIVTSPYQIHFTKTPKYFKPGMPFDLMVFVTNPDGSPAYRVPVAVQGEDTVQSLTQGDGVAKLSINTHPSQKPLSITVRTKKQELSEAEQATRTMQALPYSTVGNSNNYLHLSVLRTELRPGETLNVNFLLRMDRAHEAKIRYYTYLIMNKGRLLKAGRQVREPGQDLVVLPLSITTDFIPSFRLVAYYTLIGASGQREVVADSVWVDVKDSCVGSLVVKSGQSEDRQPVPGQQMTLKIEGDHGARVVLVAVDKGVFVLNKKNKLTQSKIWDVVEKADIGCTPGSGKDYAGVFSDAGLTFTSSSGQQTAQRAELQCPQPAARRRRSVQLTEKRMDKVGKYPKELRKCCEDGMRENPMRFSCQRRTRFISLGEACKKVFLDCCNYITELRRQHARASHLGLARSNLDEDIIAEENIVSRSEFPESWLWNVEDLKEPPKNGISTKLMNIFLKDSITTWEILAVSMSDKKGICVADPFEVTVMQDFFIDLRLPYSVVRNEQVEIRAVLYNYRQNQELKVRVELLHNPAFCSLATTKRRHQQTVTIPPKSSLSVPYVIVPLKTGLQEVEVKAAVYHHFISDGVRKSLKVVPEGIRMNKTVAVRTLDPERLGREGVQKEDIPPADLSDQVPDTESETRILLQGTPVAQMTEDAVDAERLKHLIVTPSGCGEQNMIGMTPTVIAVHYLDETEQWEKFGLEKRQGALELIKKGYTQQLAFRQPSSAFAAFVKRAPSTWLTAYVVKVFSLAVNLIAIDSQVLCGAVKWLILEKQKPDGVFQEDAPVIHQEMIGGLRNNNEKDMALTAFVLISLQEAKDICEEQVNSLPGSITKAGDFLEANYMNLQRSYTVAIAGYALAQMGRLKGPLLNKFLTTAKDKNRWEDPGKQLYNVEATSYALLALLQLKDFDFVPPVVRWLNEQRYYGGGYGSTQATFMVFQALAQYQKDAPDHQELNLDVSLQLPSRSSKITHRIHWESASLLRSEETKENEGFTVTAEGKGQGTLSVVTMYHAKAKDQLTCNKFDLKVTIKPAPETEKRPQDAKNTMILEICTRYRGDQDATMSILDISMMTGFAPDTDDLKQLANGVDRYISKYELDKAFSDRNTLIIYLDKVSHSEDDCLAFKVHQYFNVELIQPGAVKVYAYYNLEESCTRFYHPEKEDGKLNKLCRDELCRCAEENCFIQKSDDKVTLEERLDKACEPGVDYVYKTRLVKVQLSNDFDEYIMAIEQTIKSGSDEVQVGQQRTFISPIKCREALKLEEKKHYLMWGLSSDFWGEKPNLSYIIGKDTWVEHWPEEDECQDEENQKQCQDLGAFTESMVVFGCPN

SEQ ID NO: 139 - DNA, 983 bp, Homo sapiens
gtggaattcatggcatctacttcgtatgactattgcagagtgcccatggaagacggggataagcgctgtaagcttctgctggggataggaattctggtgctcctgatcatcgtgattctgggggtgcccttgattatcttcaccatcaaggccaacagcgaggcctgccgggacggccttcgggcagtgatggagtgtcgcaatgtcacccatctcctgcaacaagagctgaccgaggcccagaagggctttcaggatgtggaggcccaggccgccacctgcaaccacactgtgatggccctaatggcttccctggatgcagagaaggcccaaggacaaaagaaagtggaggagcttgagggagagatcactacattaaaccataagcttcaggacgcgtctgcagaggtggagcgactgagaagagaaaaccaggtcttaagcgtgagaatcgcggacaagaagtactaccccagctcccaggactccagctccgctgcggcgccccagctgctgattgtgctgctgggcctcagcgctctgctgcagtgagatcccaggaagctggcacatcttggaaggtccgtcctgctcggcttttcgcttgaacattcccttgatctcatcagttctgagcgggtcatggggcaacacggttagcggggagagcacggggtagccggagaagggcctctggagcaggtctggaggggccatggggcagtcctgggtgtggggacacagtcgggttgacccagggctgtctccctccagagcctccctccggacaatgagtcccccctcttgtctcccaccctgagattgggcatggggtgcggtgtggggggcatgtgctgcctgttgttatgggttttttttgcggggggggttgcttttttctggggtctttgagctccaaaaaataaacacttcctttgagggagagcaaaaaaaaaaaaaaaaaaaaaaaaaaaaaaaaaaaa

SEQ ID NO: 140 - protein, 180 aa, Homo sapiens
MASTSYDYCRVPMEDGDKRCKLLLGIGILVLLIIVILGVPLIIFTIKANSEACRDGLRAVMECRNVTHLLQQELTEAQKGFQDVEAQAATCNHTVMALMASLDAEKAQGQKKVEELEGEITTLNHKLQDASAEVERLRRENQVLSVRIADKKYYPSSQDSSSAAAPQLLIVLLGLSALLQ

SEQ ID NO: 141 - DNA, 4119 bp, Homo sapiens
ctggagagcctgctgcccgcccgcccgtaaaatggtcccctcggctggacagctcgccctgttcgctctgggtattgtgttggctgcgtgccaggccttggagaacagcacgtccccgctgagtgcagacccgcccgtggctgcagcagtggtgtcccattttaatgactgcccagattcccacactcagttctgcttccatggaacctgcaggtttttggtgcaggaggacaagccagcatgtgtctgccattctgggtacgttggtgcacgctgtgagcatgcggacctcctggccgtggtggctgccagccagaagaagcaggccatcaccgccttggtggtggtctccatcgtggccctggctgtccttatcatcacatgtgtgctgatacactgctgccaggtccgaaaacactgtgagtggtgccgggccctcatctgccggcacgagaagcccagcgccctcctgaagggaagaaccgcttgctgccactcagaaacagtggtctgaagagcccagaggaggagtttggccaggtggactgtggcagatcaataaagaaaggcttcttcaggacagcactgccagagatgcctgggtgtgccacagaccttcctacttggcctgtaatcacctgtgcagccttttgtgggccttcaaaactctgtcaagaactccgtctgcttggggttattcagtgtgacctagagaagaaatcagcggaccacgatttcaagacttgttaaaaaagaactgcaaagagacggactcctgttcacctaggtgaggtgtgtgcagcagttggtgtctgagtccacatgtgtgcagttgtcttctgccagccatggattccaggctatatatttctttttaatgggccacctccccacaacagaattctgcccaacacaggagatttctatagttattgttttctgtcatttgcctactggggaagaaagtgaaggaggggaaactgtttaatatcacatgaagaccctagctttaagagaagctgtatcctctaaccacgagactctcaaccagcccaacatcttccatggacacatgacattgaagaccatcccaagctatcgccacccttggagatgatgtcttatttattagatggataatggttttatttttaatctcttaagtcaatgtaaaaagtataaaaccccttcagacttctacattaatgatgtatgtgttgctgactgaaaagctatactgattagaaatgtctggcctcttcaagacagctaaggcttgggaaaagtcttccagggtgcggagatggaaccagaggctgggttactggtaggaataaaggtaggggttcagaaatggtgccattgaagccacaaagccggtaaatgcctcaatacgttctgggagaaaacttagcaaatccatcagcagggatctgtcccctctgttggggagagaggaagagtgtgtgtgtctacacaggataaacccaatacatattgtactgctcagtgattaaatgggttcacttcctcgtgagccctcggtaagtatgtttagaaatagaacattagccacgagccataggcatttcaggccaaatccatgaaagggggaccagtcatttattttccattttgttgcttggttggtttgttgctttatttttaaaaggagaagtttaactttgctatttattttcgagcactaggaaaactattccagtaatttttttttcctcatttccattcaggatgccggctttattaacaaaaactctaacaagtcacctccactatgtgggtcttcctttcccctcaagagaaggagcaattgttcccctgacatctgggtccatctgacccatggggcctgcctgtgagaaacagtgggtcccttcaaatacatagtggatagctcatccctaggaattttcattaaaatttggaaacagagtaatgaagaaataatatataaactccttatgtgaggaaatgctactaatatctgaaaagtgaaagatttctatgtattaactcttaagtgcacctagcttattacatcgtgaaaggtacatttaaaatatgttaaattggcttgaaattttcagagaattttgtcttcccctaattcttcttccttggtctggaagaacaatttctatgaattttctctttattttttttttataattcagacaattctatgacccgtgtcttcatttttggcactcttatttaacaatgccacacctgaagcacttggatctgttcagagctgaccccctagcaacgtagttgacacagctccaggtttttaaattactaaaataagttcaagtttacatcccttgggccagatatgtgggttgaggcttgactgtagcatcctgcttagagaccaatcaatggacactggtttttagacctctatcaatcagtagttagcatccaagagactttgcagaggcgtaggaatgaggctggacagatggcggaacgagaggttccctgcgaagacttgagatttagtgtctgtgaatgttctagttcctaggtccagcaagtcacacctgccagtgccctcatccttatgcctgtaacacacatgcagtgagaggcctcacatatacgcctccctagaagtgccttccaagtcagtcctttggaaaccagcaggtctgaaaaagaggctgcatcaatgcaagcctggttggaccattgtccatgcctcaggatagaacagcctggcttatttggggatttttcttctagaaatcaaatgactgataagcattggctccctctgccatttaatggcaatggtagtctttggttagctgcaaaaatactccatttcaagttaaaaatgcatcttctaatccatctctgcaagctccctgtgtttccttgccctttagaaaatgaattgttcactacaattagagaatcatttaacatcctgacctggtaagctgccacacacctggcagtggggagcatcgctgtttccaatggctcaggagacaatgaaaagcccccatttaaaaaaataacaaacattttttaaaaggcctccaatactcttatggagcctggatttttcccactgctctacaggctgtgactttttttaagcatcctgacaggaaatgttttcttctacatggaaagatagacagcagccaaccctgatctggaagacagggccccggctggacacacgtggaaccaagccagggatgggctggccattgtgtccccgcaggagagatgggcagaatggccctagagttcttttccctgagaaaggagaaaaagatgggattgccactcacccacccacactggtaagggaggagaatttgtgcttctggagcttctcaagggattgtgttttgcaggtacagaaaactgcctgttatcttcaagccaggttttcgagggcacatgggtcaccagttgctttttcagtcaatttggccgggatggactaatgaggctctaacactgctcaggagacccctgccctctagttggttctgggctttgatctcttccaacctgcccagtcacagaaggaggaatgactcaaatgcccaaaaccaagaacacattgcagaagtaagacaaacatgtatatttttaaatgttctaacataagacctgttctctctagccattgatttaccaggctttctgaaagatctagtggttcacacagagagagagagagtactgaaaaagcaactcctcttcttagtcttaataatttactaaaatggtcaacttttcattatctttattataataaacctgatgcttttttttagaactccttactctgatgtctgtatatgttgcactgaaaaggttaatatttaatgttttaatttattttgtgtggtaagttaattttgatttctgtaatgtgttaatgtgattagcagttattttccttaatatctgaattatacttaaagagtagtgagcaatataagacgcaattgtgtttttcagtaatgtgcattgttattgagttgtactgtaccttatttggaaggatgaaggaatgaacctttttttcctaaaaaaaaaaaaaaaaaaaaaaaaaaaaaaaaa

SEQ ID NO: 142 - protein, 160 aa, Homo sapiens
MVPSAGQLALFALGIVLAACQALENSTSPLSADPPVAAAVVSHFNDCPDSHTQFCFHGTCRFLVQEDKPACVCHSGYVGARCEHADLLAVVAASQKKQAITALVVVSIVALAVLIITCVLIHCCQVRKHCEWCRALICRHEKPSALLKGRTACCHSETVV

SEQ ID NO: 143 - DNA, 1794 bp, Homo sapiens
cccgcgccaccggcccgcgccccgccatggaggacctggatgccctgctctctgacctggagactaccacctcgcacatgccaaggtcaggggctcccaaagagcgccctgcggagcctctcacccctcccccatcctatggccaccagccacagacagggtctggggagtcttcaggagcctcgggggacaaggaccacctgtacagcacggtatgcaagcctcggtccccaaagcctgcagccccggcggcccctccattctcctcttccagcggtgtcttgggtaccgggctctgtgagctagatcggttgcttcaggaacttaatgccactcagttcaacatcacagatgaaatcatgtctcagttcccatctagcaaggtggcttcaggagagcagaaggaggaccagtctgaagataagaaaagacccagcctcccttccagcccgtctcctggcctcccaaaggcttctgccacctcagccactctggagctggatagactgatggcctcactctctgacttccgcgttcaaaaccatcttccagcctctgggccaactcagccaccggtggtgagctccacaaatgagggctccccatccccaccagagccgactggcaagggcagcctagacaccatgctggggctgctgcagtccgacctcagccgccggggtgttcccacccaggccaaaggcctctgtggctcctgcaataaacctattgctgggcaagtggtgacggctctgggccgcgcctggcaccccgagcacttcgtttgcggaggctgttccaccgccctgggaggcagcagcttcttcgagaaggatggagcccccttctgccccgagtgctactttgagcgcttctcgccaagatgtggcttctgcaaccagcccatccgacacaagatggtgaccgccttgggcactcactggcacccagagcatttctgctgcgtcagttgcggggagcccttcggagatgagggtttccacgagcgcgagggccgcccctactgccgccgggacttcctgcagctgttcgccccgcgctgccagggctgccagggccccatcctggataactacatctcggcgctcagcgcgctctggcacccggactgtttcgtctgcagggaatgcttcgcgcccttctcgggaggcagctttttcgagcacgagggccgcccgttgtgcgagaaccacttccacgcacgacgcggctcgctgtgcgccacgtgtggcctccctgtgaccggccgctgcgtgtcggccctgggtcgccgcttccacccggaccacttcacatgcaccttctgcctgcgcccgctcaccaaggggtccttccaggagcgcgccggcaagccctactgccagccctgcttcctgaagctcttcggctgacagcccgctcggctcgccctctcccccggaggccgcgccctcccggaaaagccgggtcctccagaccccgaggccttgctctcagagcgggaggccccacccactggagagccccgcccctaaggtactatgagtcctcaggggtcaagttcagaaacggcccagccagacctaaacccacacgcccacaaagtggattgcacacagacaagaactcccgtgcgggcctccactctattcccacccttgagggagcccccttactgggggagggtccttgcaattccagcgaatcggaggccaggccaggacgtccttgctccctgcaccctcactgttctgtgcactttttctacctacataaacacacgcattccacctc

SEQ ID NO: 144 - protein, 461 aa, Homo sapiens
MEDLDALLSDLETTTSHMPRSGAPKERPAEPLTPPPSYGHQPQTGSGESSGASGDKDHLYSTVCKPRSPKPAAPAAPPFSSSSGVLGTGLCELDRLLQELNATQFNITDEIMSQFPSSKVASGEQKEDQSEDKKRPSLPSSPSPGLPKASATSATLELDRLMASLSDFRVQNHLPASGPTQPPVVSSTNEGSPSPPEPTGKGSLDTMLGLLQSDLSRRGVPTQAKGLCGSCNKPIAGQVVTALGRAWHPEHFVCGGCSTALGGSSFFEKDGAPFCPECYFERFSPRCGFCNQPIRHKMVTALGTHWHPEHFCCVSCGEPFGDEGFHEREGRPYCRRDFLQLFAPRCQGCQGPILDNYISALSALWHPDCFVCRECFAPFSGGSFFEHEGRPLCENHFHARRGSLCATCGLPVTGRCVSALGRRFHPDHFTCTFCLRPLTKGSFQERAGKPYCQPCFLKLFG

SEQ ID NO: 145 - DNA, 6719 bp, Homo sapiens
tcggcgggaagcggcgatcctgccaccgggaggtgtggaagagccgggtagattctggctacattggagattggttgctttctaaaactgaaggagaagcccatgaagagatggtggattctcactgagttttgactagcggaagaaaagagagagttcaagtggatggccttgaggacttgaaaagctgagatatgatgattttgaagtcatttcacatcgaagccatgatttaaatatcggcgttaagatttcaacaagaaaaacttaagcttccttggattcccacgtcaaaggaaagtttcaagctttcagaaggagttctcactcgaagataaagaacagctcgctaaccacgaaagaggaatcgatgctcagcttttagttgcacttcctaaagttgcagaattaagacaaatctttgaaccaaagaagaaagaattcttagaaatgaaaagaaaagaaagaattgccaggcgcctggaagggattgaaaatgacactcagcccatcctcttgcagagctgcacaggattggtgactcaccgcctgctggaggaagacacccctcgatacatgagagccagcgaccctgccagcccccacatcggccgatcaaatgaagaggaggaaacttctgattcttctctagaaaagcaaactcgatccaaatactgcacagaaacctccggtgtccacggtgactcaccctatggttcgggtaccatggacacccacagtctggagtccaaagccgaaagaattgcaaggtacaaagcagaaagaaggcgacagctggcagagaagtatgggctgactctggatcccgaggccgactccgagtatttatcccgctataccaagtccaggaaggagcctgatgctgtcgagaagcggggaggaaaaagtgacaaacaggaagagtcaagcagagatgcgagttctctgtaccccgggaccgagacgatggggctcaggacctgtgccggtgaatccaaggactatgccctccatgtgggtgacggctcttccgacccggaggtgctgctgaacatagaaaaccaaagacgaggtcaagagctgagtgccacccggcaggcccatgacctgtccccagcagccgagagttcctcgaccttctctttctctgggcgagactcctccttcactgaagtgccacggtcccccaagcacgcccacagctcctccctgcagcaggcagcctcccggagcccctcctttggtgacccacagctatcccctgaggcccgacccaggtgcacttcacattcagaaacgccaactgtcgatgatgaagaaaaggtggatgaacgagccaagctgagcgtcgccgccaagaggttgcttttcagggagatggaaaaatcttttgatgaacaaaatgttccaaagcgacgctcaagaaacacagctgtggagcagaggctacgccgtctgcaggacaggtccctcacccagcccatcaccactgaagaggtggtcatcgcagccacattgcaggcctctgctcaccaaaaggccttagccaaggaccagacaaatgagggcaaagagcttgctgagcaaggagaacctgattcctccactctaagcttggccgaaaagttggccttgtttaacaaattgtcccagccagtctcaaaagcgatttctacccggaacagaatagacacgagacagaggagaatgaacgctcgctatcaaactcagccagtcacactgggagaggtggagcaggtgcagagtggaaagctcattcctttctcacctgccgtgaacacatcagtgtctaccgtagcatccacggttgctccaatgtatgccggagatcttcgcacaaagccacctcttgaccacaatgcaagtgccactgactataagttttcttcttcaatagaaaattcggactctccagttagaagcattctgaaatcgcaagcttggcagcctttggtagagggtagcgagaacaagggaatgttgagagaatatggagagacagaaagcaagagagctttgacaggtcgagacagtgggatggagaagtatgggtcctttgaggaagcagaagcatcctaccccatcctgaaccgagccagggaaggagacagccataaggaatctaaatatgctgttcccagaagaggaagcctggaacgggcgaaccctcccatcacccacctcggggatgaaccgaaggaattttccatggctaaaatgaatgcacaaggaaacttggacttgagggacaggctgccctttgaagagaaggtggaggtggagaatgttatgaaaaggaagttttcactaagagcggcagagttcggggagcccacttccgagcagacggggacagctgctgggaaaactattgctcaaaccacagcccccgtgtcctggaagccccaggattcttcggaacagccacaggagaagctctgcaagaatccatgtgcgatgtttgctgctggagagatcaaaacgccgacaggggagggccttcttgactcacccagcaaaaccatgtctattaaagaaagattggcactgttgaagaaaagcggggaggaagattggagaaacagactcagcaggaggcaggagggcggcaaggcgccggccagcagcctgcacacccaggaagcagggcggtccctcatcaagaagcgggtcacagaaagtcgagagagccaaatgacgattgaggagaggaagcagctcatcactgtgagagaggaggcctggaagacgagaggcagaggagcggccaacgactcgacccagttcactgtggctggcaggatggtgaagaaaggtttggcgtcacctactgccataaccccagtagcctcagccatttgcggtaaaacaagaggcaccacacccgtttccaaacccctggaagatatcgaagccagaccagatatgcagttagaatcggacctgaagttggacaggctggaaacctttctaagaaggctgaataacaaagttggcgggatgcacgaaacggtgctcactgtcaccggcaaatctgtgaaggaggtgatgaagccagatgatgatgaaacctttgccaaattttaccgcagcgtggattataatatgccaagaagtcctgtggagatggatgaggacttcgatgtcattttcgatccttatgcacccaaattgacgtcttccgtggccgagcacaagcgggcagttaggcccaagcgccgggttcaggcctccaaaaaccccctgaaaatgctggcggcaagagaagatctccttcaggaatacactgagcagagattaaacgttgccttcatggagtcaaagcggatgaaagtagaaaagatgtcttccaactccaacttctcagaagtcaccctggcgggtttagccagtaaagaaaacttcagcaacgtcagcctgcggagcgtcaacctgacggaacagaactctaacaacagcgccgtgccctacaagaggctgatgctgttgcagattaaaggaagaagacatgtgcagaccaggctggtggaacctcgagcttcggcgctcaacagtggggactgcttcctcctgctctctccccactgctgcttcctgtgggtaggagagtttgcaaacgtcatagaaaaggcgaaggcctcagaacttgcaactttaattcagacaaagagggaacttggttgtagagctacttatatccaaaccattgaagaaggaattaatacacacactcatgcagccaaagacttctggaagcttctgggtggccaaaccagttaccaatctgctggagacccaaaagaagatgaactctatgaagcagccataatagaaactaactgcatttaccgtctcatggatgacaaacttgttcctgatgacgactactgggggaaaattccgaagtgctcccttctgcaacccaaagaggtactggtgtttgattttggtagtgaagtttacgtatggcatgggaaagaagtcacattagcacaacgaaaaatagcatttcagctggcaaagcacttatggaatggaacctttgactatgagaactgtgacatcaatcccctggatcctggagaatgcaatccgcttatccccagaaaaggacaggggcggcccgactgggcgatatttgggagacttactgaacacaatgagacgattttgttcaaagagaagtttctggattggacggaactgaagagatcgaatgagaagaaccccggggaacttgcccagcacaaggaagaccccaggactgatgtcaaggcatacgatgtgacacggatggtgtccatgccccagacgacagcaggcaccatcctggacggagtgaacgtcggccgtggctatggcctggtggaaggacacgacaggaggcagtttgagatcaccagcgtttccgtggatgtctggcacatcctggaattcgactatagcaggctccccaaacaaagcatcgggcagttccatgagggggatgcctatgtggtcaagtggaagttcatggtgagcacggcagtgggaagtcgccagaagggagagcactcggtgagggcagccggcaaagagaagtgcgtctacttcttctggcaaggccggcactccaccgtgagtgagaagggcacgtcggcgctgatgacggtggagctggacgaggaaaggggggcccaggtccaggttctccagggaaaggagcccccctgtttcctgcagtgtttccagggggggatggtggtgcactcggggaggcgggaagaggaagaagaaaatgtgcaaagtgagtggcggctgtactgcgtgcgtggagaggtgcccgtggaagggaatttgctggaagtggcctgtcactgtagcagcctgaggtccagaacttccatggtggtgcttaacgtcaacaaggccctcatctacctgtggcacggatgcaaagcccaggcccacacgaaggaggtcggaaggaccgctgcgaacaagatcaaggaacaatgtcccctggaagcaggactgcatagtagcagcaaagtcacaatacacgagtgtgatgaaggctccgagccactcggattctgggatgccttaggaaggagagacaggaaagcctacgattgcatgcttcaagatcctggaagttttaacttcgcgccccgcctgttcatcctcagcagctcctctggggattttgcagccacagagtttgtgtaccctgcccgagccccctctgtggtcagttccatgcccttcctgcaggaagatctgtacagcgcgccccagccagcacttttccttgttgacaatcaccacgaggtgtacctctggcaaggctggtggcccatcgagaacaagatcactggttccgcccgcatccgctgggcctccgaccggaagagtgcgatggagactgtgctccagtactgcaaaggaaaaaatctcaagaaaccagcccccaagtcttaccttatccacgctggtctggagcccctgacattcaccaatatgtttcccagctgggagcacagagaggacatcgctgagatcacagagatggacacggaagtttccaatcagatcaccctcgtggaagacgtcttagccaagctctgtaaaaccatttacccgctggccgacctcctggccaggccactcccggagggggtcgatcctctgaagcttgagatctatctcaccgacgaagacttcgagtttgcactagacatgacgagggatgaatacaacgccctgcccgcctggaagcaggtgaacctgaagaaagcaaaaggcctgttctgagtggggagacgccagaggagcctcacggtcacgtccaacaacaccactgcaccagggaaatggatatatatttttggactggtgtttttcacaaagtatttttcaatcagagttttcagaacctgacattgttaaagatactgcttgtcccggagttgtgtattttgtaaatgttcaagggaactgtttggaaacttctttccaccattcaggaggttatcagaattaataaaagtatctgttatgtgcacttaagccgcagctgctatagatagcactgccttcttgttccagctaggcaatgcctttttttttttttttgaagcagttctctttataaagtgttattttgatagtttgtggattctaaaatatatatatatttatataaacaccatataagtcaaatatgtatttaacaaagcaatatgtattcattcactttcaagatttgttttggtgtcaaaataacatgaaaaggtagatggagttgcttctgttgaattagctctgccaccaatatgtatcttcatacacgtttggaaatgtttcctgcagcattaggtatgacttgttctgagtactgcttccggtgctaaaatgaacaaagaatttgtacttaatggcatggactctggagaatctatgcgaatcaacctttctaccttaatatctccccaaaaatgtatagtgccttgtttttatgtacagtttatatacagaaaagtttgctctgcatttttgatgatggtttggaacattatctacaattttactctcaaatagtcaaaataaaaacatctcaatttctaataccggttgtaaacaaacagtacacatgtcattttgtgatataggactcccaaataaaagtatcagaataaacacaacaattaactggt

SEQ ID NO: 146 - protein, 1788 aa, Homo sapiens
MKRKERIARRLEGIENDTQPILLQSCTGLVTHRLLEEDTPRYMRASDPASPHIGRSNEEEETSDSSLEKQTRSKYCTETSGVHGDSPYGSGTMDTHSLESKAERIARYKAERRRQLAEKYGLTLDPEADSEYLSRYTKSRKEPDAVEKRGGKSDKQEESSRDASSLYPGTETMGLRTCAGESKDYALHVGDGSSDPEVLLNIENQRRGQELSATRQAHDLSPAAESSSTFSFSGRDSSFTEVPRSPKHAHSSSLQQAASRSPSFGDPQLSPEARPRCTSHSETPTVDDEEKVDERAKLSVAAKRLLFREMEKSFDEQNVPKRRSRNTAVEQRLRRLQDRSLTQPITTEEVVIAATLQASAHQKALAKDQTNEGKELAEQGEPDSSTLSLAEKLALFNKLSQPVSKAISTRNRIDTRQRRMNARYQTQPVTLGEVEQVQSGKLIPFSPAVNTSVSTVASTVAPMYAGDLRTKPPLDHNASATDYKFSSSIENSDSPVRSILKSQAWQPLVEGSENKGMLREYGETESKRALTGRDSGMEKYGSFEEAEASYPILNRAREGDSHKESKYAVPRRGSLERANPPITHLGDEPKEFSMAKMNAQGNLDLRDRLPFEEKVEVENVMKRKFSLRAAEFGEPTSEQTGTAAGKTIAQTTAPVSWKPQDSSEQPQEKLCKNPCAMFAAGEIKTPTGEGLLDSPSKTMSIKERLALLKKSGEEDWRNRLSRRQEGGKAPASSLHTQEAGRSLIKKRVTESRESQMTIEERKQLITVREEAWKTRGRGAANDSTQFTVAGRMVKKGLASPTAITPVASAICGKTRGTTPVSKPLEDIEARPDMQLESDLKLDRLETFLRRLNNKVGGMHETVLTVTGKSVKEVMKPDDDETFAKFYRSVDYNMPRSPVEMDEDFDVIFDPYAPKLTSSVAEHKRAVRPKRRVQASKNPLKMLAAREDLLQEYTEQRLNVAFMESKRMKVEKMSSNSNFSEVTLAGLASKENFSNVSLRSVNLTEQNSNNSAVPYKRLMLLQIKGRRHVQTRLVEPRASALNSGDCFLLLSPHCCFLWVGEFANVIEKAKASELATLIQTKRELGCRATYIQTIEEGINTHTHAAKDFWKLLGGQTSYQSAGDPKEDELYEAAIIETNCIYRLMDDKLVPDDDYWGKIPKCSLLQPKEVLVFDFGSEVYVWHGKEVTLAQRKIAFQLAKHLWNGTFDYENCDINPLDPGECNPLIPRKGQGRPDWAIFGRLTEHNETILFKEKFLDWTELKRSNEKNPGELAQHKEDPRTDVKAYDVTRMVSMPQTTAGTILDGVNVGRGYGLVEGHDRRQFEITSVSVDVWHILEFDYSRLPKQSIGQFHEGDAYVVKWKFMVSTAVGSRQKGEHSVRAAGKEKCVYFFWQGRHSTVSEKGTSALMTVELDEERGAQVQVLQGKEPPCFLQCFQGGMVVHSGRREEEEENVQSEWRLYCVRGEVPVEGNLLEVACHCSSLRSRTSMVVLNVNKALIYLWHGCKAQAHTKEVGRTAANKIKEQCPLEAGLHSSSKVTIHECDEGSEPLGFWDALGRRDRKAYDCMLQDPGSFNFAPRLFILSSSSGDFAATEFVYPARAPSVVSSMPFLQEDLYSAPQPALFLVDNHHEVYLWQGWWPIENKITGSARIRWASDRKSAMETVLQYCKGKNLKKPAPKSYLIHAGLEPLTFTNMFPSWEHREDIAEITEMDTEVSNQITLVEDVLAKLCKTIYPLADLLARPLPEGVDPLKLEIYLTDEDFEFALDMTRDEYNALPAWKQVNLKKAKGLF

SEQ ID NO: 147 - DNA, 6829 bp, Homo sapiens
cttctctcccagggcggtgcgacccggagctccagcgcccgagtctccacttcgtttgctgaaacttgctttctaccagctaagaaccatgctgcgagtgattgtggaatctgccagcaatatccctaaaacgaaatttggcaagccggatcctattgtttctgtcatttttaaggatgagaaaaagaaaacaaagaaagttgataatgaattgaaccctgtctggaatgagattttggagtttgacttgaggggtataccactggacttttcatcttcccttgggattattgtgaaagattttgagacaattggacaaaataaattaattggcacggcgactgtagccctgaaggacctgactggtgaccagagcagatccctgccgtacaagctgatctccctgctaaatgaaaaagggcaagatactggggccaccattgacttggtgatcggctatgatccgccttctgctccacatccaaatgacctgagcgggcccagcgtgccaggcatgggaggagatggggaagaagatgaaggtgatgaagacaggttggacaatgcagtcaggggccctgggcccaaggggccagttgggacggtgtcggaagctcagcttgctcggaggctcaccaaagtaaagaacagccggcggatgctgtcaaataagccacaggacttccagatccgcgtccgagtgattgagggccgacagttaagtggtaacaacataaggcctgtggtcaaagttcacgtctgtggccagacacaccgaacaagaatcaagagaggaaacaaccctttttttgatgagttgtttttctacaatgtcaacatgaccccttctgaattgatggatgagatcatcagcatccgggtttataattctcactctctgcgggcagattgtctgatgggggaatttaagattgatgttggatttgtttatgatgaacctggccatgctgtcatgagaaagtggcttcttctcaatgacccggaagataccagttcaggttctaaaggttatatgaaagtcagcatgtttgtcctgggaaccggagatgagcctcctcctgagagacgagatcgtgataatgacagtgatgatgtggagagtaatttgttactccctgctggcattgccctccggtgggtgaccttcttgctgaaaatctaccgagctgaggacatcccccagatggatgatgccttctcacagacagtaaaggaaatatttggaggcaatgcagataagaaaaatctcgtggatccttttgtagaagtttcctttgctggaaaaaaggtttgtacaaacataattgagaaaaatgcaaacccagagtggaatcaggtcgtcaatcttcagatcaagtttccttcagtgtgtgaaaaaataaaactaacaatatatgactgggaccgtcttactaaaaatgatgtagttggaacaacatatctacacctctctaaaattgctgcctctggtggggaagtggaagatttctcatcttcgggaactggggctgcatcatatacagtaaacacaggagaaacagaggtaggctttgttccaacgtttggaccttgttacctgaatctttatggaagccccagggagtacacgggattcccagacccctatgatgagctgaatactggaaagggggaaggagttgcctacagaggcaggatcttggttgaattagccacttttcttgagaagacaccaccagataaaaagcttgagcccatttcaaatgatgacctgctggttgttgagaaataccagcgaaggcggaagtacagcctgtctgccgtgtttcattcagccaccatgttgcaagatgttggtgaggccattcagtttgaagtcagcattgggaactatggcaacaagtttgacaccacctgtaagcctttggcatcaacaactcagtacagccgtgctgtatttgatggcaactactattattacttgccttgggcccacaccaagccagttgttaccctgacttcatactgggaggatattagtcatcgcctggatgcggtgaacactctcctagctatggcagaacggctgcaaacaaatatagaagctctaaaatcagggatacaaggtaaaattcctgcaaaccagctggctgaattgtggctgaagctgatagatgaagttatagaagacacgagatacacgttgcctctcacagaaggaaaagccaacgtcacagttctcgatactcagatccgaaagctgcggtccaggtctctctcccaaatacatgaggcggctgtgaggatgaggtcggaagccacagatgtgaagtccacactggcagaaattgaggactggcttgataaattaatgcagctgactgaagagccacagaacagcatgcctgacatcatcatctggatgatccggggagagaagagactggcctatgcacgaattcccgcacatcaggtcttgtactccaccagtggtgagaatgcatctggaaaatactgtgggaaaacccaaaccatctttctgaagtatccacaggagaaaaacaacgggccaaaggtgcctgtggagttgcgagtgaacatctggctaggcttaagtgctgtggagaagaagtttaacagcttcgcagaaggaactttcaccgtctttgctgaaatgtatgaaaatcaagctctcatgtttggaaaatggggtacttctggattagtaggacgtcataagttttctgatgtcacaggaaaaataaaactcaagagggaattttttctgcctccaaaaggctgggaatgggaaggagagtggatagttgatcctgaaagaagcttgctgactgaggcagatgcaggtcacacggagttcactgatgaagtctatcagaacgagagccgctaccccgggggcgactggaagccggccgaggacacctacacggatgcgaacggcgataaagcagcatcacccagcgagttgacttgtcctccaggttgggaatgggaagatgatgcatggtcttatgacataaatcgagcggtggatgagaaaggctgggaatatggaatcaccattcctcctgatcataagcccaaatcctgggttgcagcagagaaaatgtaccacactcatagacggcgaaggctggtccgaaaacgcaagaaagatttaacacagactgcttcaagcaccgcaagggccatggaggaattgcaagaccaagagggctgggaatatgcttctctaattggctggaaatttcactggaaacaacgtagttcagataccttccgccgcagacgctggaggagaaaaatggctccttcagaaacacatggtgcagctgccatctttaaacttgaaggtgcccttggggcagacactaccgaagatggggatgagaagagcctggagaaacagaagcacagtgccaccactgtgttcggagcaaacacccccattgtttcctgcaattttgacagagtctacatctaccatctgcgctgctatgtctatcaagccagaaacctcttggctttagataaggatagcttttcagatccatatgctcatatctgtttcctccatcggagcaaaaccactgagatcatccattcaaccctgaatcccacgtgggaccaaacaattatattcgatgaagttgaaatctatggggaaccccaaacagttctacagaatccacccaaagttatcatggaactttttgacaatgaccaagtgggcaaagatgaatttttaggacgaagcattttctctcctgtggtgaaactgaactcagaaatggacatcacacccaaacttctctggcacccagtaatgaatggagacaaagcctgcggggatgttcttgtaactgcagagctgattctgaggggcaaggatggctccaaccttcccattcttccccctcaaagggcgccaaatctatacatggtcccccaggggatcaggcctgtggtccagctcactgccattgagattctagcttggggcttaagaaatatgaaaaacttccagatggcttctatcacatcccccagtcttgttgtggagtgtggaggagaaagggtggaatcggtggtgatcaaaaaccttaagaagacacccaactttccaagttctgttctcttcatgaaagtgttcttgcccaaggaggaattgtacatgcccccactggtgatcaaggtcatcgaccacaggcagtttgggcggaagcctgtcgtcggccagtgcaccatcgagcgcctggaccgctttcgctgtgacccttatgcagggaaagaggacatcgtcccacagctcaaagcctcccttctgtctgccccaccatgccgggacatcgttatcgaaatggaagacaccaaaccattactggcttctaagctgacagaaaaggaggaagaaatcgtggactggtggagtaaattttatgcttcctcaggggaacatgaaaaatgcggacagtatattcagaaaggctattccaagctcaagatatataattgtgaactagaaaatgtagcagaatttgagggcctgacagacttctcagatacgttcaagttgtaccgaggcaagtcggatgaaaatgaagatccttctgtggttggagagtttaagggctcctttcggatctaccctctgccggatgaccccagcgtgccagcccctcccagacagtttcgggaattacctgacagcgtcccacaggaatgcacggttaggatttacattgttcgaggcttagagctccagccccaggacaacaatggcctgtgtgacccttacataaaaataacactgggcaaaaaagtcattgaagaccgagatcactacattcccaacactctcaacccagtctttggcaggatgtacgaactgagctgctacttacctcaagaaaaagacctgaaaatttctgtctatgattatgacacctttacccgggatgaaaaagtaggagaaacaattattgatctggaaaaccgattcctttcccgctttgggtcccactgcggcataccagaggagtactgtgtttctggagtcaatacctggcgagatcaactgagaccaacacagctgcttcaaaatgtcgccagattcaaaggcttcccacaacccatcctttccgaagatgggagtagaatcagatatggaggacgagactacagcttggatgaatttgaagccaacaaaatcctgcaccagcacctcggggcccctgaagagcggcttgctcttcacatcctcaggactcaggggctggtccctgagcacgtggaaacaaggactttgcacagcaccttccagcccaacatttcccagggaaaacttcagatgtgggtggatgttttccccaagagtttggggccaccaggccctcctttcaacatcacaccccggaaagccaagaaatactacctgcgtgtgatcatctggaacaccaaggacgttatcttggacgagaaaagcatcacaggagaggaaatgagtgacatctacgtcaaaggctggattcctggcaatgaagaaaacaaacagaaaacagatgtccattacagatctttggatggtgaagggaattttaactggcgatttgttttcccgtttgactaccttccagccgaacaactctgtatcgttgcgaaaaaagagcatttctggagtattgaccaaacggaatttcgaatcccacccaggctgatcattcagatatgggacaatgacaagttttctctggatgactacttgggtttcctagaacttgacttgcgtcacacgatcattcctgcaaaatcaccagagaaatgcaggttggacatgattccggacctcaaagccatgaacccccttaaagccaagacagcctccctctttgagcagaagtccatgaaaggatggtggccatgctacgcagagaaagatggcgcccgcgtaatggctgggaaagtggagatgacattggaaatcctcaacgagaaggaggccgacgagaggccagccgggaaggggcgggacgaacccaacatgaaccccaagctggacttaccaaatcgaccagaaacctccttcctctggttcaccaacccatgcaagaccatgaagttcatcgtgtggcgccgctttaagtgggtcatcatcggcttgctgttcctgcttatcctgctgctcttcgtggccgtgctcctctactctttgccgaactatttgtcaatgaagattgtaaagccaaatgtgtaacaaaggcaaaggcttcatttcaagagtcatccagcaatgagagaatcctgcctctgtagaccaacatccagtgtgattttgtgtctgagaccacaccccagtagcaggttacgccatgtcaccgagccccattgattcccagagggtcttagtcctggaaagtcaggccaacaagcaacgtttgcatcatgttatctcttaagtattaaaagttttattttctaaagtttaaatcatgtttttcaaaatatttttcaaggtggctggttccatttaaaaatcatctttttatatgtgtcttcggttctagacttcagcttttggaaattgctaaatagaattcaaaaatctctgcatcctgaggtgatatacttcatatttgtaatcaactgaaagagctgtgcattataaaatcagttagaatagttagaacaattcttatttatgcccacaaccattgctatattttgtatggatgtcataaaagtctatttaacctctgtaatgaaactaaataaaaatgtttcacctttaaaaaaaaaaaaaaaaaaaaaa

SEQ ID NO: 148 - protein, 2061 aa, Homo sapiens
MLRVIVESASNIPKTKFGKPDPIVSVIFKDEKKKTKKVDNELNPVWNEILEFDLRGIPLDFSSSLGIIVKDFETIGQNKLIGTATVALKDLTGDQSRSLPYKLISLLNEKGQDTGATIDLVIGYDPPSAPHPNDLSGPSVPGMGGDGEEDEGDEDRLDNAVRGPGPKGPVGTVSEAQLARRLTKVKNSRRMLSNKPQDFQIRVRVIEGRQLSGNNIRPVVKVHVCGQTHRTRIKRGNNPFFDELFFYNVNMTPSELMDEIISIRVYNSHSLRADCLMGEFKIDVGFVYDEPGHAVMRKWLLLNDPEDTSSGSKGYMKVSMFVLGTGDEPPPERRDRDNDSDDVESNLLLPAGIALRWVTFLLKIYRAEDIPQMDDAFSQTVKEIFGGNADKKNLVDPFVEVSFAGKKVCTNIIEKNANPEWNQVVNLQIKFPSVCEKIKLTIYDWDRLTKNDVVGTTYLHLSKIAASGGEVEDFSSSGTGAASYTVNTGETEVGFVPTFGPCYLNLYGSPREYTGFPDPYDELNTGKGEGVAYRGRILVELATFLEKTPPDKKLEPISNDDLLVVEKYQRRRKYSLSAVFHSATMLQDVGEAIQFEVSIGNYGNKFDTTCKPLASTTQYSRAVFDGNYYYYLPWAHTKPVVTLTSYWEDISHRLDAVNTLLAMAERLQTNIEALKSGIQGKIPANQLAELWLKLIDEVIEDTRYTLPLTEGKANVTVLDTQIRKLRSRSLSQIHEAAVRMRSEATDVKSTLAEIEDWLDKLMQLTEEPQNSMPDIIIWMIRGEKRLAYARIPAHQVLYSTSGENASGKYCGKTQTIFLKYPQEKNNGPKVPVELRVNIWLGLSAVEKKFNSFAEGTFTVFAEMYENQALMFGKWGTSGLVGRHKFSDVTGKIKLKREFFLPPKGWEWEGEWIVDPERSLLTEADAGHTEFTDEVYQNESRYPGGDWKPAEDTYTDANGDKAASPSELTCPPGWEWEDDAWSYDINRAVDEKGWEYGITIPPDHKPKSWVAAEKMYHTHRRRRLVRKRKKDLTQTASSTARAMEELQDQEGWEYASLIGWKFHWKQRSSDTFRRRRWRRKMAPSETHGAAAIFKLEGALGADTTEDGDEKSLEKQKHSATTVFGANTPIVSCNFDRVYIYHLRCYVYQARNLLALDKDSFSDPYAHICFLHRSKTTEIIHSTLNPTWDQTIIFDEVEIYGEPQTVLQNPPKVIMELFDNDQVGKDEFLGRSIFSPVVKLNSEMDITPKLLWHPVMNGDKACGDVLVTAELILRGKDGSNLPILPPQRAPNLYMVPQGIRPVVQLTAIEILAWGLRNMKNFQMASITSPSLVVECGGERVESVVIKNLKKTPNFPSSVLFMKVFLPKEELYMPPLVIKVIDHRQFGRKPVVGQCTIERLDRFRCDPYAGKEDIVPQLKASLLSAPPCRDIVIEMEDTKPLLASKLTEKEEEIVDWWSKFYASSGEHEKCGQYIQKGYSKLKIYNCELENVAEFEGLTDFSDTFKLYRGKSDENEDPSVVGEFKGSFRIYPLPDDPSVPAPPRQFRELPDSVPQECTVRIYIVRGLELQPQDNNGLCDPYIKITLGKKVIEDRDHYIPNTLNPVFGRMYELSCYLPQEKDLKISVYDYDTFTRDEKVGETIIDLENRFLSRFGSHCGIPEEYCVSGVNTWRDQLRPTQLLQNVARFKGFPQPILSEDGSRIRYGGRDYSLDEFEANKILHQHLGAPEERLALHILRTQGLVPEHVETRTLHSTFQPNISQGKLQMWVDVFPKSLGPPGPPFNITPRKAKKYYLRVIIWNTKDVILDEKSITGEEMSDIYVKGWIPGNEENKQKTDVHYRSLDGEGNFNWRFVFPFDYLPAEQLCIVAKKEHFWSIDQTEFRIPPRLIIQIWDNDKFSLDDYLGFLELDLRHTIIPAKSPEKCRLDMIPDLKAMNPLKAKTASLFEQKSMKGWWPCYAEKDGARVMAGKVEMTLEILNEKEADERPAGKGRDEPNMNPKLDLPNRPETSFLWFTNPCKTMKFIVWRRFKWVIIGLLFLLILLLFVAVLLYSLPNYLSMKIVKPNV

SEQ ID NO: 149 - DNA, 1551 bp, Homo sapiens
cctgagctcaggagtttgagaccagcctgtctctactaacaatataaaaattagctgggagtcacggtgggcgcctgtaatcccagctactcgggaggctgaggcaggagaattgcttgaacccaggagacagaggttgtagtgagctgagatcgcaccactgcactctagccttggcaacagtgcaagactgtctcaaaaacagcaacagagagcaggacgtgagacttctacctgctcactcagaatcatttctgcaccaaccatggccacgtttgtggagctcagtaccaaagccaagatgcccattgtgggcctgggcacttggaagtctcctcttggcaaagtgaaagaagcagtgaaggtggccattgatgcaggatatcggcacattgactgtgcctatgtctatcagaatgaacatgaagtgggggaagccatccaagagaagatccaagagaaggctgtgaagcgggaggacctgttcatcgtcagcaagttgtggcccactttctttgagagaccccttgtgaggaaagcctttgagaagaccctcaaggacctgaagctgagctatctggacgtctatcttattcactggccacagggattcaagtctggggatgaccttttccccaaagatgataaaggtaatgccatcggtggaaaagcaacgttcttggatgcctgggaggccatggaggagctggtggatgaggggctggtgaaagcccttggggtctccaatttcagccacttccagatcgagaagctcttgaacaaacctggactgaaatataaaccagtgactaaccaggttgagtgtcacccatacctcacacaggagaaactgatccagtactgccactccaagggcatcaccgttacggcctacagccccctgggctctccggatagaccttgggccaagccagaagacccttccctgctggaggatcccaagattaaggagattgctgcaaagcacaaaaaaaccgcagcccaggttctgatccgtttccatatccagaggaatgtgattgtcatccccaagtctgtgacaccagcacgcattgttgagaacattcaggtctttgactttaaattgagtgatgaggagatggcaaccatactcagcttcaacagaaactggagggcctgtaacgtgttgcaatcctctcatttggaagactatcccttcgatgcagaatattgaggttgaatctcctggtgagattatacaggagattctctttcttcgctgaagtgtgactacctccactcatgtcccattttagccaagcttatttaagatcacagtgaacttagtcctgttatagacgagaatcgaggtgctgttttagacatttatttctgtatgttcaactaggatcagaatatcacagaaaagcatggcttgaataaggaaatgacaattttttccacttatctgatcagaacaaatgtttattaagcatcagaaactctgccaacactgaggatgtaaagatcaataaaaaaaataataatcataaaaaaaaaaaaaaaaaa

SEQ ID NO: 150 - protein, 316 aa, Homo sapiens
MATFVELSTKAKMPIVGLGTWKSPLGKVKEAVKVAIDAGYRHIDCAYVYQNEHEVGEAIQEKIQEKAVKREDLFIVSKLWPTFFERPLVRKAFEKTLKDLKLSYLDVYLIHWPQGFKSGDDLFPKDDKGNAIGGKATFLDAWEAMEELVDEGLVKALGVSNFSHFQIEKLLNKPGLKYKPVTNQVECHPYLTQEKLIQYCHSKGITVTAYSPLGSPDRPWAKPEDPSLLEDPKIKEIAAKHKKTAAQVLIRFHIQRNVIVIPKSVTPARIVENIQVFDFKLSDEEMATILSFNRNWRACNVLQSSHLEDYPFDAEY

SEQ ID NO: 151 - DNA, 1412 bp, Homo sapiens
ggctgcgcttccctggtcaggcacggcacgtctggccggccgccaggatgcaggccccgcacaaggagcacctgtacaagttgctggtgattggcgacctgggcgtggggaagaccagtatcatcaagcgctacgtgcaccagaacttctcctcgcactaccgggccacaatcggcgtggacttcgcgctcaaggtgctccactgggacccggagactgtggtgcgcctgcagctctgggatatcgcaggtcaagaaagatttggaaacatgacgagggtctattaccgagaagctatgggtgcatttattgtcttcgatgtcaccaggccagccacatttgaagcagtggcaaagtggaaaaatgatttggactccaagttaagtctccctaatggcaaaccggtttcagtggttttgttggccaacaaatgtgaccaggggaaggatgtgctcatgaacaatggcctcaagatggaccagttctgcaaggagcacggtttcgtaggatggtttgaaacatcagcaaaggaaaatataaacattgatgaagcctccagatgcctggtgaaacacatacttgcaaatgagtgtgacctaatggagtctattgagccggacgtcgtgaagccccatctcacatcaaccaaggttgccagctgctctggctgtgccaaatcctagtaggcacctttgctggtgtctggtaggaatgacctcattgttccacaaattgtgcctctatttttaccattttgggtaaacgtcaggatagatataccacatgtggcaagccaaagatctatgcctctgttttttcaatgagagagaaatagcaaatgttctttctatgctttcctcaccatcatcacagtgtttacaaacttttgaaaatatttagtctgttacaaacttctgtcatgtagctgaccaaaatcctgcagggccacagtcggcactgttatttgcttcttttaatcagcaaaggcctcaagtcttaaaataaaaggggagaagaacaaactagctgtcaagtcaaggactggctttcaccttgccctggtgtctttttccagatttcaatatattctctgatggcctgacaggcctattaagtagatgtgatattttcttccaagatgacctccattctcggcagacctaagagttgcctctgagttagctctttggaatcgtgaacacaggtgtgctatattgtccttgtcctaactgtcacttgccatggcctgaatgttggcttaactgaatattgtatgaaaagacatgcctccatatgtgcctttctgttagctctctttgactcaagctgtggggctcctctatacatgctatacatgtaatatatattatatatatttttgcaagtgaacaataaaacattaaaagataaaa

SEQ ID NO: 152 - protein, 211 aa, Homo sapiens
MQAPHKEHLYKLLVIGDLGVGKTSIIKRYVHQNFSSHYRATIGVDFALKVLHWDPETVVRLQLWDIAGQERFGNMTRVYYREAMGAFIVFDVTRPATFEAVAKWKNDLDSKLSLPNGKPVSVVLLANKCDQGKDVLMNNGLKMDQFCKEHGFVGWFETSAKENINIDEASRCLVKHILANECDLMESIEPDVVKPHLTSTKVASCSGCAKS

SEQ ID NO: 153 - DNA, 2060 bp, Homo sapiens
tgttcccagcactcaagccttgccaccgccgagccgggcttcctgggtgtttcaggcaaggaagtctaggtccctggggggtgacccccaaggaaaaggcagcctccctgcgcacccggttgcccggagccctctccagggccggctgggctgggggttgccctggccagcaggggcccgggggcgatgccacccggtgccgactgaggccaccgcaccatggcccgctcgctgacctggcgctgctgcccctggtgcctgacggaggatgagaaggccgccgcccgggtggaccaggagatcaacaggatcctcttggagcagaagaagcaggaccgcggggagctgaagctgctgcttttgggcccaggcgagagcgggaagagcaccttcatcaagcagatgcggatcatccacggcgccggctactcggaggaggagcgcaagggcttccggcccctggtctaccagaacatcttcgtgtccatgcgggccatgatcgaggccatggagcggctgcagattccattcagcaggcccgagagcaagcaccacgctagcctggtcatgagccaggacccctataaagtgaccacgtttgagaagcgctacgctgcggccatgcagtggctgtggagggatgccggcatccgggcctgctatgagcgtcggcgggaattccacctgctcgattcagccgtgtactacctgtcccacctggagcgcatcaccgaggagggctacgtccccacagctcaggacgtgctccgcagccgcatgcccaccactggcatcaacgagtactgcttctccgtgcagaaaaccaacctgcggatcgtggacgtcgggggccagaagtcagagcgtaagaaatggatccattgtttcgagaacgtgatcgccctcatctacctggcctcactgagtgaatacgaccagtgcctggaggagaacaaccaggagaaccgcatgaaggagagcctcgcattgtttgggactatcctggaactaccctggttcaaaagcacatccgtcatcctctttctcaacaaaaccgacatcctggaggagaaaatccccacctcccacctggctacctatttccccagtttccagggccctaagcaggatgctgaggcagccaagaggttcatcctggacatgtacacgaggatgtacaccgggtgcgtggacggccccgagggcagcaagaagggcgcacgatcccgacgccttttcagccactacacatgtgccacagacacacagaacatccgcaaggtcttcaaggacgtgcgggactcggtgctcgcccgctacctggacgagatcaacctgctgtgacccaggccccacctggggcaggcggcaccggcgggcgggtgggaggtgggagtggctgcagggaccctagtgtcctggtctatctctccagcctcggcccacacgcaagggagtcgggggacggcccgctgctggccgctctcttctctgcctctcaccaggacagccgccccccagggtactcctgcccttgcttgactcagtttccctcctttgaaagggaaggagcaaaacggccatttgggatgccagggtggatgaaaaggtgaagaaatcaggggattgagacttgggtgggtgggcatctctcaggagccccatctccgggcgtgtcacctcctgggcagggttctgggaccctctgtgggtgacgcacaccctgggatggggctagtagagccttcaggcgccttcgggcgtggactctggcgcactctagtggacaggagaaggaacgccttccaggaacctgtggactaggggtgcagggacttccctttgcaaggggtaacagaccgctggaaaacactgtcactttcagagctcggtggctcacagcgtgtcctgccccggtttgcggacgagagaaatcgcggcccacaagcatcccccatcccttgcaggctgggggctgggcatgctgcatcttaaccttttgtatttattccctcaccttctgcagggctccgtgcgggctgaaattaaagatttcttag

SEQ ID NO: 154 - protein, 374 aa, Homo sapiens
MARSLTWRCCPWCLTEDEKAAARVDQEINRILLEQKKQDRGELKLLLLGPGESGKSTFIKQMRIIHGAGYSEEERKGFRPLVYQNIFVSMRAMIEAMERLQIPFSRPESKHHASLVMSQDPYKVTTFEKRYAAAMQWLWRDAGIRACYERRREFHLLDSAVYYLSHLERITEEGYVPTAQDVLRSRMPTTGINEYCFSVQKTNLRIVDVGGQKSERKKWIHCFENVIALIYLASLSEYDQCLEENNQENRMKESLALFGTILELPWFKSTSVILFLNKTDILEEKIPTSHLATYFPSFQGPKQDAEAAKRFILDMYTRMYTGCVDGPEGSKKGARSRRLFSHYTCATDTQNIRKVFKDVRDSVLARYLDEINLL

SEQ ID NO: 155 - DNA, 4714 bp, Homo sapiens
ggagagggagaaggctctcgggcggagagaggtcctgcccagctgttggcgaggagtttcctgtttcccccgcagcgctgagttgaagttgagtgagtcactcgcgcgcacggagcgacgacacccccgcgcgtgcacccgctcgggacaggagccggactcctgtgcagcttccctcggccgccgggggcctccccgcgcctcgccggcctccaggccccctcctggctggcgagcgggcgccacatctggcccgcacatctgcgctgccggcccggcgcggggtccggagagggcgcggcgcggaggcgcagccaggggtccgggaaggcgccgtccgctgcgctgggggctcggtctatgacgagcagcggggtctgccatgggtcgggggctgctcaggggcctgtggccgctgcacatcgtcctgtggacgcgtatcgccagcacgatcccaccgcacgttcagaagtcggatgtggaaatggaggcccagaaagatgaaatcatctgccccagctgtaataggactgcccatccactgagacatattaataacgacatgatagtcactgacaacaacggtgcagtcaagtttccacaactgtgtaaattttgtgatgtgagattttccacctgtgacaaccagaaatcctgcatgagcaactgcagcatcacctccatctgtgagaagccacaggaagtctgtgtggctgtatggagaaagaatgacgagaacataacactagagacagtttgccatgaccccaagctcccctaccatgactttattctggaagatgctgcttctccaaagtgcattatgaaggaaaaaaaaaagcctggtgagactttcttcatgtgttcctgtagctctgatgagtgcaatgacaacatcatcttctcagaagaatataacaccagcaatcctgacttgttgctagtcatatttcaagtgacaggcatcagcctcctgccaccactgggagttgccatatctgtcatcatcatcttctactgctaccgcgttaaccggcagcagaagctgagttcaacctgggaaaccggcaagacgcggaagctcatggagttcagcgagcactgtgccatcatcctggaagatgaccgctctgacatcagctccacgtgtgccaacaacatcaaccacaacacagagctgctgcccattgagctggacaccctggtggggaaaggtcgctttgctgaggtctataaggccaagctgaagcagaacacttcagagcagtttgagacagtggcagtcaagatctttccctatgaggagtatgcctcttggaagacagagaaggacatcttctcagacatcaatctgaagcatgagaacatactccagttcctgacggctgaggagcggaagacggagttggggaaacaatactggctgatcaccgccttccacgccaagggcaacctacaggagtacctgacgcggcatgtcatcagctgggaggacctgcgcaagctgggcagctccctcgcccgggggattgctcacctccacagtgatcacactccatgtgggaggcccaagatgcccatcgtgcacagggacctcaagagctccaatatcctcgtgaagaacgacctaacctgctgcctgtgtgactttgggctttccctgcgtctggaccctactctgtctgtggatgacctggctaacagtgggcaggtgggaactgcaagatacatggctccagaagtcctagaatccaggatgaatttggagaatgttgagtccttcaagcagaccgatgtctactccatggctctggtgctctgggaaatgacatctcgctgtaatgcagtgggagaagtaaaagattatgagcctccatttggttccaaggtgcgggagcacccctgtgtcgaaagcatgaaggacaacgtgttgagagatcgagggcgaccagaaattcccagcttctggctcaaccaccagggcatccagatggtgtgtgagacgttgactgagtgctgggaccacgacccagaggcccgtctcacagcccagtgtgtggcagaacgcttcagtgagctggagcatctggacaggctctcggggaggagctgctcggaggagaagattcctgaagacggctccctaaacactaccaaatagctcttctggggcaggctgggccatgtccaaagaggctgcccctctcaccaaagaacagaggcagcaggaagctgcccctgaactgatgcttcctggaaaaccaagggggtcactcccctccctgtaagctgtggggataagcagaaacaacagcagcagggagtgggtgacatagagcattctatgcctttgacattgtcataggataagctgtgttagcacttcctcaggaaatgagattgatttttacaatagccaataacatttgcactttattaatgcctgtatataaatatgaatagctatgttttatatatatatatatatatctatatatgtctatagctctatatatatagccataccttgaaaagagacaaggaaaaacatcaaatattcccaggaaattggttttattggagaactccagaaccaagcagagaaggaagggacccatgacagcattagcatttgacaatcacacatgcagtggttctctgactgtaaaacagtgaactttgcatgaggaaagaggctccatgtctcacagccagctatgaccacattgcacttgcttttgcaaaataatcattccctgcctagcacttctcttctggccatggaactaagtacagtggcactgtttgaggaccagtgttcccggggttcctgtgtgcccttatttctcctggacttttcatttaagctccaagccccaaatctggggggctagtttagaaactctccctcaacctagtttagaaactctaccccatctttaataccttgaatgttttgaaccccactttttaccttcatgggttgcagaaaaatcagaacagatgtccccatccatgcgattgccccaccatctactaatgaaaaattgttctttttttcatctttcccctgcacttatgttactattctctgctcccagccttcatccttttctaaaaaggagcaaattctcactctaggctttatcgtgtttactttttcattacacttgacttgattttctagttttctatacaaacaccaatgggttccatctttctgggctcctgattgctcaagcacagtttggcctgatgaagaggatttcaactacacaatactatcattgtcaggactatgacctcaggcactctaaacatatgttttgtttggtcagcacagcgtttcaaaaagtgaagccactttataaatatttggagattttgcaggaaaatctggatccccaggtaaggatagcagatggttttcagttatctccagtccacgttcacaaaatgtgaaggtgtggagacacttacaaagctgcctcacttctcactgtaaacattagctctttccactgcctacctggaccccagtctaggaattaaatctgcacctaaccaaggtcccttgtaagaaatgtccattcaagcagtcattctctgggtatataatatgattttgactaccttatctggtgttaagatttgaagttggccttttattggactaaaggggaactcctttaagggtctcagttagcccaagtttcttttgcttatatgttaatagttttaccctctgcattggagagaggagtgctttactccaagaagctttcctcatggttaccgttctctccatcatgccagccttctcaacctttgcagaaattactagagaggatttgaatgtgggacacaaaggtcccatttgcagttagaaaatttgtgtccacaaggacaagaacaaagtatgagctttaaaactccataggaaacttgttaatcaacaaagaagtgttaatgctgcaagtaatctcttttttaaaactttttgaagctacttattttcagccaaataggaatattagagagggactggtagtgagaatatcagctctgtttggatggtggaaggtctcattttattgagatttttaagatacatgcaaaggtttggaaatagaacctctaggcaccctcctcagtgtgggtgggctgagagttaaagacagtgtggctgcagtagcatagaggcgcctagaaattccacttgcaccgtagggcatgctgataccatcccaatagctgttgcccattgacctctagtggtgagtttctagaatactggtccattcatgagatattcaagattcaagagtattctcacttctgggttatcagcataaactggaatgtagtgtcagaggatactgtggcttgttttgtttatgtttttttttcttattcaagaaaaaagaccaaggaataacattctgtagttcctaaaaatactgacttttttcactactatacataaagggaaagttttattcttttatggaacacttcagctgtactcatgtattaaaataggaatgtgaatgctatatactctttttatatcaaaagtctcaagcacttatttttattctatgcattgtttgtcttttacataaataaaatgtttattagattgaataaagcaaaatactcaggtgagcatcctgcctcctgttcccattcctagtagctaaaaaaaaaaaaa

SEQ ID NO: 156 - protein, 592 aa, Homo sapiens
MGRGLLRGLWPLHIVLWTRIASTIPPHVQKSDVEMEAQKDEIICPSCNRTAHPLRHINNDMIVTDNNGAVKFPQLCKFCDVRFSTCDNQKSCMSNCSITSICEKPQEVCVAVWRKNDENITLETVCHDPKLPYHDFILEDAASPKCIMKEKKKPGETFFMCSCSSDECNDNIIFSEEYNTSNPDLLLVIFQVTGISLLPPLGVAISVIIIFYCYRVNRQQKLSSTWETGKTRKLMEFSEHCAIILEDDRSDISSTCANNINHNTELLPIELDTLVGKGRFAEVYKAKLKQNTSEQFETVAVKIFPYEEYASWKTEKDIFSDINLKHENILQFLTAEERKTELGKQYWLITAFHAKGNLQEYLTRHVISWEDLRKLGSSLARGIAHLHSDHTPCGRPKMPIVHRDLKSSNILVKNDLTCCLCDFGLSLRLDPTLSVDDLANSGQVGTARYMAPEVLESRMNLENVESFKQTDVYSMALVLWEMTSRCNAVGEVKDYEPPFGSKVREHPCVESMKDNVLRDRGRPEIPSFWLNHQGIQMVCETLTECWDHDPEARLTAQCVAERFSELEHLDRLSGRSCSEEKIPEDGSLNTTK

SEQ ID NO: 157 - DNA, 3960 bp, Homo sapiens
gttctgaatgatgactgacgcgggtttgggtgatacccctcacagcccctgtcattccggagtcataaggcacccgcgcgtctagccccagcgccagggcacgcgagcggcgctggagggaggaaagcttccgcctgcgggccggacaaaagtcccgcctgcccacggctttttgcccgccgctcgtgaccgagacgcctcgccgcggccagctcgctgctctcgctggcggatggtgtgtggccgccgcaggacgcccgccgtgcccgggccatgaagtagcggctgctggcggcgccgctgcccaaccgccagccccagccccgcgctgcgctgcccggtcctctcccggcggggtcgtatcggcgtggacatggctggccgcgtccctagcctgctagttctccttgtttttccaagcagctgtttggctttccgaagcccactttctgtctttaagaggtttaaagaaactaccagaccattttccaatgaatgtcttggtaccaccagacccgtagttcctattgattcatcagattttgcattggatattcgcatgcctggggttacacctaaacagtccgatacatacttctgcatgtctatgcgaataccagtggatgaggaagccttcgtgattgacttcaagcctcgagccagcatggatactgtccatcacatgttactttttggatgcaatatgccttcatccactggaagttactggttttgtgatgaaggaacctgtacagataaagccaatattctgtatgcctgggcgagaaatgctccccctacccggctccccaaaggtgttggattcagagttggaggagagactggaagtaaatactttgtactacaggtacactatggggatattagtgcttttagagataataacaaggactgttctggtgtgtccttacacctcacacgtctgccacagcctttaattgctggcatgtaccttatgatgtctgttgacactgttatcccagcaggagaaaaagtggtgaattctgacatttcatgccattataaaaattatccaatgcatgtctttgcctatagagttcacactcaccatttaggtaaggtagtaagtggatacagagtaagaaatggacagtggacactgattggacggcagagccctcagctgccacaggctttctaccctgtggggcatccagttgatgtaagttttggtgacctactggctgcaagatgtgtattcactggtgaaggaaggacagaagccacacacattggtggcacgtctagtgatgaaatgtgcaacttatacattatgtattacatggaagccaagcatgcagtttctttcatgacctgtacccagaatgtagctccagatatgttcagaaccataccaccagaggccaacattccaattcccgtgaagtctgatatggttatgatgcatgaacatcataaagaaacagaatataaagataagattcctttactacagcagccaaaacgagaagaagaagaagtgttagaccagggtgatttctattcactactttccaagctgctaggagaaagggaagatgttgttcatgtgcacaaatataatcctacagaaaaggcagaatcagagtcagacctggtagctgagattgcaaatgtagtccaaaaaaaggatcttggtcgatctgatgccagagagggtgcagaacatgagaggggtaatgctattcttgtcagagacagaattcacaaattccacagactagtatctaccttgaggccaccagagagcagagttttctcattacagcagcccccacctggtgaaggcacctgggaaccagaacacacaggagatttccacatggaagaggcactggattggcctggagtatacttgttaccaggccaggtttctggggtggctctagaccctaagaataacctggtgattttccacagaggtgaccatgtctgggatggaaactcgtttgacagcaagtttgtttaccagcaaataggactcggaccaattgaagaagacactattcttgtcatagatccaaataatgctgcagtactccagtccagtggaaaaaatctgttttacttgccacatggcttgagtatagataaagatgggaattattgggtcacagacgtggctctccatcaggtgttcaaactggatccaaacaataaagaaggccctgtattaatcctgggaaggagcatgcaaccaggcagtgaccagaatcacttctgtcaacccactgatgtggctgtggatccaggcactggagccatttatgtatcagatggttactgcaacagcaggattgtgcagttttcaccaagtggaaagttcatcacacagtggggagaagagtcttcagggagcagtcctctgccaggccagttcactgttcctcacagcttggctcttgtgcctcttttgggccaattatgtgtggcagaccgggaaaatggtcggatccagtgttttaaaactgacaccaaagaatttgtgagagagattaagcattcatcatttggaagaaatgtatttgcaatttcatatataccaggcttgctctttgcagtgaatgggaagcctcattttggggaccaagaacctgtacaaggatttgtgatgaacttttccaatggggaaattatagacatcttcaagccagtgcgcaagcactttgatatgcctcatgatattgttgcatctgaagatgggactgtgtacattggagatgctcataccaacaccgtgtggaagttcaccttgactgagaaattggaacatcgatcagttaaaaaggctggcattgaggtccaggaaatcaaagaagccgaggcagttgttgaaaccaaaatggagaacaaacccacctcctcagaattgcagaagatgcaagagaaacagaaactgatcaaagagccaggctcgggagtgcctgttgttctcattacaacccttctggttattccggtggttgtcctgctggccattgccatatttattcggtggaaaaaatcaagggcctttggagcagattctgaacacaaactcgagacgagttcaggaagagtactgggaagatttagaggaaagggaagtggaggcttaaaccttggtaatttctttgcaagccgtaagggctacagtcgaaaagggtttgaccggcttagcactgagggcagtgaccaagagaaagaggatgatggaagtgaatcagaagaggagtattcagcacctctgcctgcgctcgcaccttcctcctcctgaaaaccaagctttgatttagattgagtaagatttacccagaatgtcagattcctttccctttagcacgtttaaagttctgtgtatttaattgtaaactgtactagtctgtgtgggactgtacacactttatttacttcgttttggttaagttggcttctgtttctagttgaggagtttcctaaaagttcataacagtgccattgtctttatatgaacatagactagagaaaccgtcctctttttccatcataattctaatctaacaatggaagatttgcccatttacacttttgagactttttggtggatgtaaataaccccattctttgcttgaacacagtattttcccaatagcactttcattgccagtgtctttctttggtgcctttcctgttcagcattcttagcctgtggcagtaaagagaaactttgtgctacatgacgacaaagctgctaaatctcctatttttttaaaatcactaacattatattgcaatgaaggaaataaaaaagtctctatttaaattcttttttaaattttcttcagttggtgtgtttttgggatgtcttatttttagatggttacactgttagaacactattttcagaatctgaatgtaatttgtgtaataaagtgttttcagagcaaaaaaaaaaaaaaa

SEQ ID NO: 158 - protein, 974 aa, Homo sapiens
MAGRVPSLLVLLVFPSSCLAFRSPLSVFKRFKETTRPFSNECLGTTRPVVPIDSSDFALDIRMPGVTPKQSDTYFCMSMRIPVDEEAFVIDFKPRASMDTVHHMLLFGCNMPSSTGSYWFCDEGTCTDKANILYAWARNAPPTRLPKGVGFRVGGETGSKYFVLQVHYGDISAFRDNNKDCSGVSLHLTRLPQPLIAGMYLMMSVDTVIPAGEKVVNSDISCHYKNYPMHVFAYRVHTHHLGKVVSGYRVRNGQWTLIGRQSPQLPQAFYPVGHPVDVSFGDLLAARCVFTGEGRTEATHIGGTSSDEMCNLYIMYYMEAKHAVSFMTCTQNVAPDMFRTIPPEANIPIPVKSDMVMMHEHHKETEYKDKIPLLQQPKREEEEVLDQGDFYSLLSKLLGEREDVVHVHKYNPTEKAESESDLVAEIANVVQKKDLGRSDAREGAEHERGNAILVRDRIHKFHRLVSTLRPPESRVFSLQQPPPGEGTWEPEHTGDFHMEEALDWPGVYLLPGQVSGVALDPKNNLVIFHRGDHVWDGNSFDSKFVYQQIGLGPIEEDTILVIDPNNAAVLQSSGKNLFYLPHGLSIDKDGNYWVTDVALHQVFKLDPNNKEGPVLILGRSMQPGSDQNHFCQPTDVAVDPGTGAIYVSDGYCNSRIVQFSPSGKFITQWGEESSGSSPLPGQFTVPHSLALVPLLGQLCVADRENGRIQCFKTDTKEFVREIKHSSFGRNVFAISYIPGLLFAVNGKPHFGDQEPVQGFVMNFSNGEIIDIFKPVRKHFDMPHDIVASEDGTVYIGDAHTNTVWKFTLTEKLEHRSVKKAGIEVQEIKEAEAVVETKMENKPTSSELQKMQEKQKLIKEPGSGVPVVLITTLLVIPVVVLLAIAIFIRWKKSRAFGADSEHKLETSSGRVLGRFRGKGSGGLNLGNFFASRKGYSRKGFDRLSTEGSDQEKEDDGSESEEEYSAPLPALAPSSS

SEQ ID NO: 159 - DNA, 1496 bp, Homo sapiens
gctctaagcgcccggggccccgcccagtggccggcacagccaatcgcagcgcgggaaggcggtgggggcggggaaggccgcctggaaacttaaatcccgaggcgggcgaacctgcaccagaccgcggacgtctgtaatctcagaggcttgtttgctgagggtgcctgcgcagctgcgacggctgctggttttgaaacatgaatctttcgctcgtcctggctgccttttgcttgggaatagcctccgctgttccaaaatttgaccaaaatttggatacaaagtggtaccagtggaaggcaacacacagaagattatatggcgcgaatgaagaaggatggaggagagcagtgtgggaaaagaatatgaaaatgattgaactgcacaatggggaatacagccaagggaaacatggcttcacaatggccatgaatgcttttggtgacatgaccaatgaagaattcaggcagatgatgggttgctttcgaaaccagaaattcaggaaggggaaagtgttccgtgagcctctgtttcttgatcttcccaaatctgtggattggagaaagaaaggctacgtgacgccagtgaagaatcagaaacagtgtggttcttgttgggcttttagtgcgactggtgctcttgaaggacagatgttccggaaaactgggaaacttgtctcactgagcgagcagaatctggtggactgttcgcgtcctcaaggcaatcagggctgcaatggtggcttcatggctagggccttccagtatgtcaaggagaacggaggcctggactctgaggaatcctatccatatgtagcagtggatgaaatctgtaagtacagacctgagaattctgttgctaatgacactggcttcacagtggtcgcacctggaaaggagaaggccctgatgaaagcagtcgcaactgtggggcccatctccgttgctatggatgcaggccattcgtccttccagttctacaaatcaggcatttattttgaaccagactgcagcagcaaaaacctggatcatggtgttctggtggttggctacggctttgaaggagcaaattcgaataacagcaagtattggctcgtcaaaaacagctggggtccagaatggggctcgaatggctatgtaaaaatagccaaagacaagaacaaccactgtggaatcgccacagcagccagctaccccaatgtgtgagctgatggatggtgaggaggaaggacttaaggacagcatgtctggggaaattttatcttgaaactgaccaaacgcttattgtgtaagataaaccagttgaatcattgaggatccaagttgagattttaattctgtgacatttttacaagggtaaaatgttaccactactttaattattgttatacacagctttatgatatcaaagactcattgcttaattctaagacttttgaattttcattttttaaaaagatgtacaaaacagtttgaaataaattttaattcgtatataaa

SEQ ID NO: 160 - protein, 334 aa, Homo sapiens
MNLSLVLAAFCLGIASAVPKFDQNLDTKWYQWKATHRRLYGANEEGWRRAVWEKNMKMIELHNGEYSQGKHGFTMAMNAFGDMTNEEFRQMMGCFRNQKFRKGKVFREPLFLDLPKSVDWRKKGYVTPVKNQKQCGSCWAFSATGALEGQMFRKTGKLVSLSEQNLVDCSRPQGNQGCNGGFMARAFQYVKENGGLDSEESYPYVAVDEICKYRPENSVANDTGFTVVAPGKEKALMKAVATVGPISVAMDAGHSSFQFYKSGIYFEPDCSSKNLDHGVLVVGYGFEGANSNNSKYWLVKNSWGPEWGSNGYVKIAKDKNNHCGIATAASYPNV

SEQ ID NO: 161 - DNA, 11659 bp, Homo sapiens
gctggagggatcctccattcctgtgtcatttgcatgggtcctgctgtgaaatgaacctggcagggacttgttagacacttccttccttccctcattgagcactccagtgccattgttccacagttgttctaattgggtcctagcttcctcctgccaaggcaaacagcatagtctcgagtaggtgtccctaggctcatctgccagcctgaacatgaacacaggcaaagctgatgatggccagggaccccaggggacgtggggccctgtggggtctggcccccaggagcaagacctctgatgatgctggtgtctgggagtgagcaccatgcccatcacccaggacaatgccgtgctgcacctgcccctcctctaccagtggctgcagaacagcctgcaggaaggtggggatgggccggagcagcggctctgccaggcggccatccagaagctgcaggagtacatccagctgaactttgctgtggatgagagtacggtcccacctgatcacagcccccccgaaatggagatctgtactgtgtacctcaccaaggagctgggggacacagagactgtgggcctgagttttgggaacatccctgttttcggggactatggtgaaaagcgcagggggggcaagaagaggaaaacccaccagggtcctgtgctggatgtgggctgcatctgggtgacagagctgaggaagaacagcccagcagggaagagtgggaaggtccgactgcgggatgagatcctctcactgaatgggcagctgatggttggagttgatgtcagtggggccagttacctggctgagcagtgctggaatggcggctttatctacctgatcatgctgcgtcgctttaagcacaaagcccactccacttataatggcaacagtagcaacagctctgaaccaggagaaacacctaccttggagctgggtgaccgaactgcgaaaaaggggaaacgaaccagaaagtttggggtcatctccaggcctcctgccaacaaggcccctgaagaatccaagggcagcgctggctgtgaggtgtccagtgaccccagcactgagctggagaacggccctgaccctgaacttggaaacggccatgtctttcagctagaaaatggcccagattctctcaaggaggtggctggaccccatctagagaggtcagaagtggacagagggacagagcatagaattccaaagacagatgctcctctgaccacaagcaatgacaaacgccgcttctcaaaaggtgggaagacggacttccaatcgagtgactgcctggcacgggaggaagttggccgaatatggaagatggagctgctcaaagaatcggatgggctgggaattcaggttagtggaggccgaggatcaaagcgctcacctcacgctatcgttgtcactcaagtgaaggaaggaggtgccgctcacagggatggcaggctgtccttaggagatgagctgctggtaatcaatggtcatttactggtcgggctctcccacgaggaagcagtggccattcttcgctccgccacgggaatggtgcagcttgtggtggccagcaaggaaaactccgcagaggacctcctcaggttaacatctaagagcttgccagatctgaccagctcggtagaagatgtgtcctcctggactgataacgaagaccaggaggcagacggggaagaggacgaaggaaccagctcttctgtccagagagcaatgcctgggacagatgaaccccaagatgtgtgcggtgctgaggaatccaaggggaacttggaaagtcccaaacagggcagcaataaaatcaagctcaagagtcgcctttcagggggtgtacaccgccttgagtcagttgaagaatataacgagctgatggtgcggaatggggacccccggatccggatgttggaggtctcccgagatggccggaaacactccctcccgcagctgctggactcttccagtgcctcacaggaataccacattgtgaagaagtctacccgctccttaagcacgactcaggtggaatctccttggaggctcattcggccatccgtcatctcgatcattgggttgtacaaagaaaaaggcaagggccttggctttagtattgctggaggtcgagactgcattcgtggacagatggggatttttgtcaagaccatcttcccaaatggatcagctgcagaggacggaagacttaaagaaggggatgaaatcctagatgtaaatggaataccaataaagggcttgacatttcaagaagccattcatacctttaagcaaatccggagtggattatttgttttaacggtacgcacaaagttggtgagccccagcctcacaccctgctcgacacccacacacatgagcagatccgcctccccgaacttcaataccagtgggggagcctcagcgggaggttccgatgaaggcagttcttcatccctgggtcggaagacccctgggcccaaggacaggatcgtcatggaagtaacactcaacaaagagccaagagttggattaggcattggtgcctgctgcttggctctggaaaacagtcctcctggcatctacattcacagccttgctccaggatcagtggccaagatggagagcaacctgagccgcggggatcaaatcctggaagtgaactccgtcaacgtccgccatgctgctttaagcaaagtccacgccatcttgagtaaatgccctccaggacccgttcgccttgtcatcggccggcaccctaatccaaaggtttccgagcaggaaatggatgaagtcatagcacgcagcacttatcaggagagcaaagaggccaattcctctcctggcttaggtacccccttgaagagtccctctcttgcaaaaaaggactcccttatttctgaatctgaactctcccagtactttgcccacgatgtccctggccccttgtcagacttcatggtggccggttctgaggacgaggatcacccgggaagtggctgcagcacgtcggaggagggcagcctgcctcccagcacctccactcacaaggagcctggaaaacccagagccaacagcctcgtgactcttgggagccatcgggcttctgggctcttccacaagcaggtgacagttgccagacaagccagtctccccggaagcccacaggccctccgaaaccctctcctccgccagaggaaggtaggctgctacgatgccaacgatgccagtgatgaggaagagtttgacagagaaggggactgcatttcactcccaggggccctcccgggtcccatcaggcctctgtcagaggatgacccgaggcgtgtctcaatttcctcttccaagggcatggacgtccacaaccaagaggaacgaccccggaaaacactggtgagcaaggccatctcggcacctcttcttggtagctcagtggacttagaggagagtatcccagagggcatggtggatgctgcgtcctatgcagccaacctcacggactctgcagaggcccccaaggggagccctggaagctggtggaagaaggaactgtcaggatcaagtagcgcacccaaattggaatacacagtccgtacagacacccagagtccgacgaacactgggagccccagttccccccagcagaaaagtgaaggcctgggctccaggcacagaccagtggccagggtaagcccccactgcaagagatccgaggctgaggccaagcccagtggctcacagacagtgaacctgactggcagagccaatgatccatgcgatctggactcgagagtccaggccacttctgtcaaagtgactgtcgctggctttcagccaggtggagctgtggagaaggaatctctgggaaagctgaccactggagatgcttgtgtctctaccagctgtgaactagccagtgctctgtcccatctggatgccagccacctcacagagaacctgcccaaagctgcatcagagctggggcaacaacccatgactgaactggacagctcctcagacctcatctcttccccagggaagaagggggccgctcatcctgaccccagcaagacctctgtagacacagggcaagtcagtcggccagagaatcccagccagcctgcatcgcccagggtcaccaagtgcaaggccaggtctccagtcaggctcccccatgagggcagcccctccccgggggagaaagcagcggctccccctgactacagcaagactcgatcagcatcggaaaccagcacaccccacaataccaggagggtggctgccctcaggggagcgggacctggagcagagggaatgacaccagctggtgctgtcctgccaggagaccccctcacatcccaggagcagagacagggagctccaggtaaccacagtaaggctctggaaatgacaggaatccatgcacctgaaagctcccaggagccttccctgctggagggagcagattctgtgtcctcaagggcaccgcaggccagcctctccatgctgccatccactgacaacaccaaagaagcatgtggccatgtctcggggcactgctgcccaggggggagtagagagagccctgtgacggacattgacagcttcatcaaggagctggatgcttctgcagcaaggtctccgtcttcccagacgggggacagtggctctcaggagggcagtgctcagggccacccaccagccggggctggaggtgggagctcctgccgtgccgaaccagtcccggggggccagacctcctccccgaggagggcctgggctgctggtgcccccgcctacccacaatgggcctcccagccttcggttttagattcaattaatcccgacaaacattttactgtgaacaaaaactttctgagcaactactctagaaattttagcagttttcatgaagacagcacctccctatcaggcctgggtgacagcacggagccgtctctgtcatccatgtatggcgatgctgaggattcttcttctgaccctgagtcactcactgaagccccacgagcttctgccagggacggctggtcccctcctcgttcccgtgtgtctttgcacaaggaagatccttcggagtcagaagaggaacagattgagatttgttccacacgtggctgccccaatccaccctcgagtcctgctcatcttcccacccaggctgccatctgtcctgcctcagccaaagttctgtcattaaaatacagcactccgagagagtcggtggccagtccccgtgagaaggccgcctgcttgccaggctcatacacttcaggcccagactcttcccagccatcatcactcttggagatgagctctcaggagcatgaaactcatgcggacataagcacttcacagaaccacaggccctcgtgtgcagaagaaaccacagaagtcaccagcgctagctcagccatggaaaacagtccgctgtctaaagtagccaggcattttcacagtccgcccatcattctcagctcccccaacatggtaaatggcttggaacatgacctgctagatgacgaaaccctgaatcaatacgaaacaagcattaatgcagctgccagtctgtcctccttcagtgtggatgtccctaagaatggagaatctgttttggaaaacctccacatctctgaaagtcaagacctggatgacttgctacagaaaccaaaaatgatcgctaggaggcccatcatggcctggtttaaagaaataaataaacataaccaaggcacacatttgaggagcaaaaccgagaaggaacaacctctaatgcctgccagaagtcccgactccaagattcagatggtgagttcaagccaaaaaaagggcgttactgtgcctcatagccctcctcagccgaaaacaaacctggaaaataaggacctgtctaagaagagtccggcagaaatgcttctgactaatggtcagaaggcaaagtgtggtccgaagctgaagaggctcagcctcaagggcaaggccaaagtcaactctgaggcccctgctgcgaatgctgtgaaggctggggggacggaccacaggaaacccttgatctcaccccagacctcccacaaaacactttctaaggcagtgtcacagcggctccatgtagccgaccacgaggaccctgacagaaacaccacagctgcccccaggtccccccagtgtgtgctggaaagcaagccacctcttgccacctctgggccactgaaaccctcagtgtctgacacgagcatcaggacatttgtctcgcccctgacctctcccaagcctgttcctgagcaaggcatgtggagcaggttccacatggctgtcctctctgaacccgacagaggttgcccaaccacccctaaatctcctaagtgtagagcagagggcagggcgccccgtgctgactccgggccggtgagtccggcagcgtctaggaacggcatgtccgtggcagggaacagacagagtgagccgcgcctggccagccatgtggcagcagacacagcccaacccaggccgactggcgaaaaaggaggcaacataatggccagcgatcgcctcgaaagaacaaaccagctgaaaatcgtggagatttctgctgaagcagtgtcagagactgtatgtggtaacaagccagctgaaagcgacagacggggagggtgcttggcccagggcaactgtcaggagaagagtgaaatcaggctctatcgccaggtcgcagaatcatccacaagtcatccatcctcactcccatctcatgcctcccaggcagagcaggaaatgtcacgatcattcagcatggcaaaactggcgtcctcctcctcctcccttcaaacagccattagaaaggcagaatactcccagggaaaatcaagcctgatgtcagactcccgaggggtgcccagaaacagcattccagggggcccctcgggggaggaccatctctacttcaccccaaggccagcgaccaggacctactccatgccagcccagttctcaagccattttggacgggagggtcaccccccacacagcctgggtcgctctcgggacagccaggtccctgtgacaagcagtgttgtccccgaggcaaaggcatccagaggtggtcttcccagcctggctaatggacagggcatatatagtgtaaagccgctgctggacacatcgaggaatcttccagccacagatgaaggggatatcatttcagtccaggagacgagctgcctagtcacagacaaaatcaaagtcaccagacgacactactgctatgagcagaactggccccatgaatctacctcatttttctctgtgaagcagcggatcaagtcttttgagaacctggccaatgctgaccggcctgtagccaagtccggggcttccccatttttgtcggtgagctccaagcctcccattgggaggcggtcttccggcagcattgtttccgggagcctgggccacccaggtgacgcagcagcaaggttgttgagacgcagcttgagttcctgcagcgaaaaccaaagcgaagccggcaccctcctgccccagatggccaagtctccctcaatcatgacactgaccatctctcggcagaacccaccagagaccagtagcaagggctctgattcggaactaaagaaatcacttggtcctttgggaattcccaccccaacgatgaccctggcttctcctgttaagaggaacaagtcctcggtacgccacacgcagccctcgcccgtgtcccgctccaagctccaggagctgagagccttgagcatgcctgaccttgacaagctctgcagcgaggattactcagcagggccgagcgccgtgctcttcaaaactgagctggagatcacccccaggaggtcacctggccctcctgctggaggcgtttcgtgtcccgagaagggcgggaacagggcctgtccaggaggaagtggccctaaaaccagtgctgctgagacacccagttcagccagtgatacgggtgaagctgcccaggatctgccttttagaagaagctggtcagttaatttggatcaacttctagtctcagcgggggaccagcaaagattacagtctgttttatcgtcagtgggatcgaaatctaccatcctaactctcattcaggaagcgaaagcacaatcagagaatgaagaagatgtttgcttcatagtcttgaatagaaaagaaggctcaggtctgggattcagtgtggcaggagggacagatgtggagccaaaatcaatcacggtccacagggtgttttctcagggggcggcttctcaggaagggactatgaaccgaggggatttccttctgtcagtcaacggcgcctcactggctggcttagcccacgggaatgtcctgaaggttctgcaccaggcacagctgcacaaagatgccctcgtggtcatcaagaaagggatggatcagcccaggccctctgcccggcaggagcctcccacagccaatgggaagggtttgctgtccagaaagaccatccccctggagcctggcattgggagaagtgtggctgtacacgatgctctgtgtgttgaagtgctgaagacctcggctgggctgggactgagtctggatgggggaaaatcatcggtgacgggagatgggcccttggtcattaaaagagtgtacaaaggtggtgcggctgaacaagctggaataatagaagctggagatgaaattcttgctattaatgggaaacctctggttgggctcatgcactttgatgcctggaatattatgaagtctgtcccagaaggacctgtgcagttattaattagaaagcataggaattcttcatgaattttaacaagaatcattttctcagttctcttctttctttagcaaatcagagtgacttctttaaaccacaggttgttgaaatggccaacactggtacagacacggactataaaaatctccaagcttgtgcttacacatgaagcctgacttaactgtatgtgcaacagcaatgaaattaactccagaagccttccacctgcgtcacccaggccgggagggttccttcgttccagtgcctgtcccctacctttatgttatgtttactgatggggatacaagatgtgacacacccttctttatttgaaacaaacaaacatttagctagacctttgcttccttcttgccagctctcccaacatacccaatcctggtgatcagggaactaaaagtctgagggggacacaaatgtcacacctaagaggacaatcaatcattttgtatgattttgtaagtaaatgacagaatgcttttaggcacattcaatggaaggaggagatgtaggtctgtatatgttaccctgaaaagagaataagacttacttaaaaaaatgaattatgacctgttaggctgagctcaggaattgtccaaaaaggaaaaagcaaaataattaattgagagtattttttagtgagtgtaatgtataatgtacgtatgcaaagttcaactcaataggttattgatcaccatgaagtattgatcattttctatctcaaaagtgtaagccataaggctgttttacagaatagcacttctgataagctgtattaaatagccatgagcttcactgcttagagggagcagaaaggtcaacatctaaaagcaccttacaactagtttttgaacctgtcttgataagtgcttgaattcaagactggtcagtccaagagcagacaaaaatatcacaagtcagtcagtcactgggtttccatttctgaattttatgcactccaaccatgaatttaaactaaatttttagaaatcaagtatctttctaagtgtccttggatttatagacaatgtatgtacaatccaaatagaggagcttaatggaatccttttaggagactggttggtttttttccctctttcccaacatgtttaagaaatgtaacattctaagtattggatctcttttcttgacctagtataatgacaactgcagtgacttaagtttttgctgttttcgttttcccgctttgcaatttcctccttttgccaaaaatgttttcctacagaagactgtcgtgactcacgctacttgggaaactcactctggccactcctcctctggtggcatgagctgcttcccagtagctattccgattggatattccgttcgtcgtcacatagctggcttttctctcctcatgatgtaccttattttcttaggtaaataattccaaactctcatcgggtcataaagaggaggagaaacagggtgagtcaaggtaaaggagcagaaatgtagttacaagccaggtcgtcttcagtggcacaaaccaacccgttgagccctgacaacatgagtggagagtgcatttgccatacctgtgtgcatgacactaagattttatgttggagatacttctttaaataacctacagcttgggtctatggctgtgacccccagattcatggaggggctttagccatcagctttgtacatcatcatttttctgaatgaccaatcccactaaacatctttgaagtcggcctagagaggtccttcagatgagagagaaatagctggcttgtctgagtccagatttctcatcaactggcaatacaaaggaaaatatggtacaggagttagttagaaaggtcttattgattttacttctacttttcactacagttacaggtagaatactgtaggaagtcagtgcaaggtgcatgcttgattgatagatattgattgattgtttttcagtctctggggtcagttttgtggtttctgctttcttgcctaaatcaaagactatttcaagtcaacaacactgaaaactgcttttcgcctccactcttacagctgtgcctaataataattaattaataaacgcacagccctatgtgaacagacaggaatttcttgtgcaatgtggagcaaatggaatggtctccttccgcaagtctttttaatcctcatatctggagtacaagggtagacctctggcttaccacatacactatgctaaagtcatcagccactgctactacatcttgccagaaggtttccctcgccaacaaacagttgaaatttaagggaagaagcaaaagctaaactgtctttgaccctaagatagatagaaagctatttatttgtcttcagtgttcaaggcatgactagtatttctaattagcctaataaattcccacactttctgaagtgaacactaatggtattgtcctactaaaactgtcattgtttctttttttttaactggtcagtcattcacaataagctatgagggtaaataaatatgtgttataacaagtaaaccgtagttgcaagaatataccatgaagattaaagtaggctgggtttcatttccatcttcccacacatctcattgaatttgatggttgacttaattggcaccataactttgtatgatattatacattaacctttatttatgtaaagtaaaatgccttatatattaaagagtaagtgcaataatatgaaatagcctgtacattttaaaaatgttgtcaccaagttatataaatccacatctctgtaaacaaccttttttaagtaattttaaaaaaaataaacactctgcttactacttgaaaaaaaaaaaaaaaaaa

SEQ ID NO: 162 - protein, 2839 aa, Homo sapiens
MPITQDNAVLHLPLLYQWLQNSLQEGGDGPEQRLCQAAIQKLQEYIQLNFAVDESTVPPDHSPPEMEICTVYLTKELGDTETVGLSFGNIPVFGDYGEKRRGGKKRKTHQGPVLDVGCIWVTELRKNSPAGKSGKVRLRDEILSLNGQLMVGVDVSGASYLAEQCWNGGFIYLIMLRRFKHKAHSTYNGNSSNSSEPGETPTLELGDRTAKKGKRTRKFGVISRPPANKAPEESKGSAGCEVSSDPSTELENGPDPELGNGHVFQLENGPDSLKEVAGPHLERSEVDRGTEHRIPKTDAPLTTSNDKRRFSKGGKTDFQSSDCLAREEVGRIWKMELLKESDGLGIQVSGGRGSKRSPHAIVVTQVKEGGAAHRDGRLSLGDELLVINGHLLVGLSHEEAVAILRSATGMVQLVVASKENSAEDLLRLTSKSLPDLTSSVEDVSSWTDNEDQEADGEEDEGTSSSVQRAMPGTDEPQDVCGAEESKGNLESPKQGSNKIKLKSRLSGGVHRLESVEEYNELMVRNGDPRIRMLEVSRDGRKHSLPQLLDSSSASQEYHIVKKSTRSLSTTQVESPWRLIRPSVISIIGLYKEKGKGLGFSIAGGRDCIRGQMGIFVKTIFPNGSAAEDGRLKEGDEILDVNGIPIKGLTFQEAIHTFKQIRSGLFVLTVRTKLVSPSLTPCSTPTHMSRSASPNFNTSGGASAGGSDEGSSSSLGRKTPGPKDRIVMEVTLNKEPRVGLGIGACCLALENSPPGIYIHSLAPGSVAKMESNLSRGDQILEVNSVNVRHAALSKVHAILSKCPPGPVRLVIGRHPNPKVSEQEMDEVIARSTYQESKEANSSPGLGTPLKSPSLAKKDSLISESELSQYFAHDVPGPLSDFMVAGSEDEDHPGSGCSTSEEGSLPPSTSTHKEPGKPRANSLVTLGSHRASGLFHKQVTVARQASLPGSPQALRNPLLRQRKVGCYDANDASDEEEFDREGDCISLPGALPGPIRPLSEDDPRRVSISSSKGMDVHNQEERPRKTLVSKAISAPLLGSSVDLEESIPEGMVDAASYAANLTDSAEAPKGSPGSWWKKELSGSSSAPKLEYTVRTDTQSPTNTGSPSSPQQKSEGLGSRHRPVARVSPHCKRSEAEAKPSGSQTVNLTGRANDPCDLDSRVQATSVKVTVAGFQPGGAVEKESLGKLTTGDACVSTSCELASALSHLDASHLTENLPKAASELGQQPMTELDSSSDLISSPGKKGAAHPDPSKTSVDTGQVSRPENPSQPASPRVTKCKARSPVRLPHEGSPSPGEKAAAPPDYSKTRSASETSTPHNTRRVAALRGAGPGAEGMTPAGAVLPGDPLTSQEQRQGAPGNHSKALEMTGIHAPESSQEPSLLEGADSVSSRAPQASLSMLPSTDNTKEACGHVSGHCCPGGSRESPVTDIDSFIKELDASAARSPSSQTGDSGSQEGSAQGHPPAGAGGGSSCRAEPVPGGQTSSPRRAWAAGAPAYPQWASQPSVLDSINPDKHFTVNKNFLSNYSRNFSSFHEDSTSLSGLGDSTEPSLSSMYGDAEDSSSDPESLTEAPRASARDGWSPPRSRVSLHKEDPSESEEEQIEICSTRGCPNPPSSPAHLPTQAAICPASAKVLSLKYSTPRESVASPREKAACLPGSYTSGPDSSQPSSLLEMSSQEHETHADISTSQNHRPSCAEETTEVTSASSAMENSPLSKVARHFHSPPIILSSPNMVNGLEHDLLDDETLNQYETSINAAASLSSFSVDVPKNGESVLENLHISESQDLDDLLQKPKMIARRPIMAWFKEINKHNQGTHLRSKTEKEQPLMPARSPDSKIQMVSSSQKKGVTVPHSPPQPKTNLENKDLSKKSPAEMLLTNGQKAKCGPKLKRLSLKGKAKVNSEAPAANAVKAGGTDHRKPLISPQTSHKTLSKAVSQRLHVADHEDPDRNTTAAPRSPQCVLESKPPLATSGPLKPSVSDTSIRTFVSPLTSPKPVPEQGMWSRFHMAVLSEPDRGCPTTPKSPKCRAEGRAPRADSGPVSPAASRNGMSVAGNRQSEPRLASHVAADTAQPRPTGEKGGNIMASDRLERTNQLKIVEISAEAVSETVCGNKPAESDRRGGCLAQGNCQEKSEIRLYRQVAESSTSHPSSLPSHASQAEQEMSRSFSMAKLASSSSSLQTAIRKAEYSQGKSSLMSDSRGVPRNSIPGGPSGEDHLYFTPRPATRTYSMPAQFSSHFGREGHPPHSLGRSRDSQVPVTSSVVPEAKASRGGLPSLANGQGIYSVKPLLDTSRNLPATDEGDIISVQETSCLVTDKIKVTRRHYCYEQNWPHESTSFFSVKQRIKSFENLANADRPVAKSGASPFLSVSSKPPIGRRSSGSIVSGSLGHPGDAAARLLRRSLSSCSENQSEAGTLLPQMAKSPSIMTLTISRQNPPETSSKGSDSELKKSLGPLGIPTPTMTLASPVKRNKSSVRHTQPSPVSRSKLQELRALSMPDLDKLCSEDYSAGPSAVLFKTELEITPRRSPGPPAGGVSCPEKGGNRACPGGSGPKTSAAETPSSASDTGEAAQDLPFRRSWSVNLDQLLVSAGDQQRLQSVLSSVGSKSTILTLIQEAKAQSENEEDVCFIVLNRKEGSGLGFSVAGGTDVEPKSITVHRVFSQGAASQEGTMNRGDFLLSVNGASLAGLAHGNVLKVLHQAQLHKDALVVIKKGMDQPRPSARQEPPTANGKGLLSRKTIPLEPGIGRSVAVHDALCVEVLKTSAGLGLSLDGGKSSVTGDGPLVIKRVYKGGAAEQAGIIEAGDEILAINGKPLVGLMHFDAWNIMKSVPEGPVQLLIRKHRNSS

SEQ ID NO: 163 - DNA, 5925 bp, Homo sapiens
gcgctgcccgcctcgtccccacccccccaacccccgcgcccgccctcggacagtccctgctcgcccgcgcgctgcagccccatctcctagcggcagcccaggcgcggagggagcgagtccgccccgaggtaggtccaggacgggcgcacagcagcagccgaggctggccgggagagggaggaagaggatggcagggccacgccccagcccatgggccaggctgctcctggcagccttgatcagcgtcagcctctctgggaccttggcaaaccgctgcaagaaggccccagtgaagagctgcacggagtgtgtccgtgtggataaggactgcgcctactgcacagacgagatgttcagggaccggcgctgcaacacccaggcggagctgctggccgcgggctgccagcgggagagcatcgtggtcatggagagcagcttccaaatcacagaggagacccagattgacaccaccctgcggcgcagccagatgtccccccaaggcctgcgggtccgtctgcggcccggtgaggagcggcattttgagctggaggtgtttgagccactggagagccccgtggacctgtacatcctcatggacttctccaactccatgtccgatgatctggacaacctcaagaagatggggcagaacctggctcgggtcctgagccagctcaccagcgactacactattggatttggcaagtttgtggacaaagtcagcgtcccgcagacggacatgaggcctgagaagctgaaggagccctggcccaacagtgacccccccttctccttcaagaacgtcatcagcctgacagaagatgtggatgagttccggaataaactgcagggagagcggatctcaggcaacctggatgctcctgagggcggcttcgatgccatcctgcagacagctgtgtgcacgagggacattggctggcgcccggacagcacccacctgctggtcttctccaccgagtcagccttccactatgaggctgatggcgccaacgtgctggctggcatcatgagccgcaacgatgaacggtgccacctggacaccacgggcacctacacccagtacaggacacaggactacccgtcggtgcccaccctggtgcgcctgctcgccaagcacaacatcatccccatctttgctgtcaccaactactcctatagctactacgagaagcttcacacctatttccctgtctcctcactgggggtgctgcaggaggactcgtccaacatcgtggagctgctggaggaggccttcaatcggatccgctccaacctggacatccgggccctagacagcccccgaggccttcggacagaggtcacctccaagatgttccagaagacgaggactgggtcctttcacatccggcggggggaagtgggtatataccaggtgcagctgcgggcccttgagcacgtggatgggacgcacgtgtgccagctgccggaggaccagaagggcaacatccatctgaaaccttccttctccgacggcctcaagatggacgcgggcatcatctgtgatgtgtgcacctgcgagctgcaaaaagaggtgcggtcagctcgctgcagcttcaacggagacttcgtgtgcggacagtgtgtgtgcagcgagggctggagtggccagacctgcaactgctccaccggctctctgagtgacattcagccctgcctgcgggagggcgaggacaagccgtgctccggccgtggggagtgccagtgcgggcactgtgtgtgctacggcgaaggccgctacgagggtcagttctgcgagtatgacaacttccagtgtccccgcacttccgggttcctctgcaatgaccgaggacgctgctccatgggccagtgtgtgtgtgagcctggttggacaggcccaagctgtgactgtcccctcagcaatgccacctgcatcgacagcaatgggggcatctgtaatggacgtggccactgtgagtgtggccgctgccactgccaccagcagtcgctctacacggacaccatctgcgagatcaactactcggcgatccacccgggcctctgcgaggacctacgctcctgcgtgcagtgccaggcgtggggcaccggcgagaagaaggggcgcacgtgtgaggaatgcaacttcaaggtcaagatggtggacgagcttaagagagccgaggaggtggtggtgcgctgctccttccgggacgaggatgacgactgcacctacagctacaccatggaaggtgacggcgcccctgggcccaacagcactgtcctggtgcacaagaagaaggactgccctccgggctccttctggtggctcatccccctgctcctcctcctcctgccgctcctggccctgctactgctgctatgctggaagtactgtgcctgctgcaaggcctgcctggcacttctcccgtgctgcaaccgaggtcacatggtgggctttaaggaagaccactacatgctgcgggagaacctgatggcctctgaccacttggacacgcccatgctgcgcagcgggaacctcaagggccgtgacgtggtccgctggaaggtcaccaacaacatgcagcggcctggctttgccactcatgccgccagcatcaaccccacagagctggtgccctacgggctgtccttgcgcctggcccgcctttgcaccgagaacctgctgaagcctgacactcgggagtgcgcccagctgcgccaggaggtggaggagaacctgaacgaggtctacaggcagatctccggtgtacacaagctccagcagaccaagttccggcagcagcccaatgccgggaaaaagcaagaccacaccattgtggacacagtgctgatggcgccccgctcggccaagccggccctgctgaagcttacagagaagcaggtggaacagagggccttccacgacctcaaggtggcccccggctactacaccctcactgcagaccaggacgcccggggcatggtggagttccaggagggcgtggagctggtggacgtacgggtgcccctctttatccggcctgaggatgacgacgagaagcagctgctggtggaggccatcgacgtgcccgcaggcactgccaccctcggccgccgcctggtaaacatcaccatcatcaaggagcaagccagagacgtggtgtcctttgagcagcctgagttctcggtcagccgcggggaccaggtggcccgcatccctgtcatccggcgtgtcctggacggcgggaagtcccaggtctcctaccgcacacaggatggcaccgcgcagggcaaccgggactacatccccgtggagggtgagctgctgttccagcctggggaggcctggaaagagctgcaggtgaagctcctggagctgcaagaagttgactccctcctgcggggccgccaggtccgccgtttccacgtccagctcagcaaccctaagtttggggcccacctgggccagccccactccaccaccatcatcatcagggacccagatgaactggaccggagcttcacgagtcagatgttgtcatcacagccaccccctcacggcgacctgggcgccccgcagaaccccaatgctaaggccgctgggtccaggaagatccatttcaactggctgcccccttctggcaagccaatggggtacagggtaaagtactggattcagggtgactccgaatccgaagcccacctgctcgacagcaaggtgccctcagtggagctcaccaacctgtacccgtattgcgactatgagatgaaggtgtgcgcctacggggctcagggcgagggaccctacagctccctggtgtcctgccgcacccaccaggaagtgcccagcgagccagggcgtctggccttcaatgtcgtctcctccacggtgacccagctgagctgggctgagccggctgagaccaacggtgagatcacagcctacgaggtctgctatggcctggtcaacgatgacaaccgacctattgggcccatgaagaaagtgctggttgacaaccctaagaaccggatgctgcttattgagaaccttcgggagtcccagccctaccgctacacggtgaaggcgcgcaacggggccggctgggggcctgagcgggaggccatcatcaacctggccacccagcccaagaggcccatgtccatccccatcatccctgacatccctatcgtggacgcccagagcggggaggactacgacagcttccttatgtacagcgatgacgttctacgctctccatcgggcagccagaggcccagcgtctccgatgacactggctgcggctggaagttcgagcccctgctgggggaggagctggacctgcggcgcgtcacgtggcggctgcccccggagctcatcccgcgcctgtcggccagcagcgggcgctcctccgacgccgaggcgccccacgggcccccggacgacggcggcgcgggcgggaagggcggcagcctgccccgcagtgcgacacccgggccccccggagagcacctggtgaatggccggatggactttgccttcccgggcagcaccaactccctgcacaggatgaccacgaccagtgctgctgcctatggcacccacctgagcccacacgtgccccaccgcgtgctaagcacatcctccaccctcacacgggactacaactcactgacccgctcagaacactcacactcgaccacactgcccagggactactccaccctcacctccgtctcctcccacgactctcgcctgactgctggtgtgcccgacacgcccacccgcctggtgttctctgccctggggcccacatctctcagagtgagctggcaggagccgcggtgcgagcggccgctgcagggctacagtgtggagtaccagctgctgaacggcggtgagctgcatcggctcaacatccccaaccctgcccagacctcggtggtggtggaagacctcctgcccaaccactcctacgtgttccgcgtgcgggcccagagccaggaaggctggggccgagagcgtgagggtgtcatcaccattgaatcccaggtgcacccgcagagcccactgtgtcccctgccaggctccgccttcactttgagcactcccagtgccccaggcccgctggtgttcactgccctgagcccagactcgctgcagctgagctgggagcggccacggaggcccaatggggatatcgtcggctacctggtgacctgtgagatggcccaaggaggagggccagccaccgcattccgggtggatggagacagccccgagagccggctgaccgtgccgggcctcagcgagaacgtgccctacaagttcaaggtgcaggccaggaccactgagggcttcgggccagagcgcgagggcatcatcaccatagagtcccaggatggaggacccttcccgcagctgggcagccgtgccgggctcttccagcacccgctgcaaagcgagtacagcagcatcaccaccacccacaccagcgccaccgagcccttcctagtggatgggctgaccctgggggcccagcacctggaggcaggcggctccctcacccggcatgtgacccaggagtttgtgagccggacactgaccaccagcggaacccttagcacccacatggaccaacagttcttccaaacttgaccgcaccctgccccacccccgccacgtcccactaggcgtcctcccgactcctctcccggagcctcctcagctactccatccttgcacccctgggggcccagcccacccgcatgcacagagcaggggctaggtgtctcctgggaggcatgaagggggcaaggtccgtcctctgtgggcccaaacctatttgtaaccaaagagctgggagcagcacaaggacccagcctttgttctgcacttaataaatggttttgctactgctaaaaaaa

SEQ ID NO: 164 - protein, 1822 aa, Homo sapiens
MAGPRPSPWARLLLAALISVSLSGTLANRCKKAPVKSCTECVRVDKDCAYCTDEMFRDRRCNTQAELLAAGCQRESIVVMESSFQITEETQIDTTLRRSQMSPQGLRVRLRPGEERHFELEVFEPLESPVDLYILMDFSNSMSDDLDNLKKMGQNLARVLSQLTSDYTIGFGKFVDKVSVPQTDMRPEKLKEPWPNSDPPFSFKNVISLTEDVDEFRNKLQGERISGNLDAPEGGFDAILQTAVCTRDIGWRPDSTHLLVFSTESAFHYEADGANVLAGIMSRNDERCHLDTTGTYTQYRTQDYPSVPTLVRLLAKHNIIPIFAVTNYSYSYYEKLHTYFPVSSLGVLQEDSSNIVELLEEAFNRIRSNLDIRALDSPRGLRTEVTSKMFQKTRTGSFHIRRGEVGIYQVQLRALEHVDGTHVCQLPEDQKGNIHLKPSFSDGLKMDAGIICDVCTCELQKEVRSARCSFNGDFVCGQCVCSEGWSGQTCNCSTGSLSDIQPCLREGEDKPCSGRGECQCGHCVCYGEGRYEGQFCEYDNFQCPRTSGFLCNDRGRCSMGQCVCEPGWTGPSCDCPLSNATCIDSNGGICNGRGHCECGRCHCHQQSLYTDTICEINYSAIHPGLCEDLRSCVQCQAWGTGEKKGRTCEECNFKVKMVDELKRAEEVVVRCSFRDEDDDCTYSYTMEGDGAPGPNSTVLVHKKKDCPPGSFWWLIPLLLLLLPLLALLLLLCWKYCACCKACLALLPCCNRGHMVGFKEDHYMLRENLMASDHLDTPMLRSGNLKGRDVVRWKVTNNMQRPGFATHAASINPTELVPYGLSLRLARLCTENLLKPDTRECAQLRQEVEENLNEVYRQISGVHKLQQTKFRQQPNAGKKQDHTIVDTVLMAPRSAKPALLKLTEKQVEQRAFHDLKVAPGYYTLTADQDARGMVEFQEGVELVDVRVPLFIRPEDDDEKQLLVEAIDVPAGTATLGRRLVNITIIKEQARDVVSFEQPEFSVSRGDQVARIPVIRRVLDGGKSQVSYRTQDGTAQGNRDYIPVEGELLFQPGEAWKELQVKLLELQEVDSLLRGRQVRRFHVQLSNPKFGAHLGQPHSTTIIIRDPDELDRSFTSQMLSSQPPPHGDLGAPQNPNAKAAGSRKIHFNWLPPSGKPMGYRVKYWIQGDSESEAHLLDSKVPSVELTNLYPYCDYEMKVCAYGAQGEGPYSSLVSCRTHQEVPSEPGRLAFNVVSSTVTQLSWAEPAETNGEITAYEVCYGLVNDDNRPIGPMKKVLVDNPKNRMLLIENLRESQPYRYTVKARNGAGWGPEREAIINLATQPKRPMSIPIIPDIPIVDAQSGEDYDSFLMYSDDVLRSPSGSQRPSVSDDTGCGWKFEPLLGEELDLRRVTWRLPPELIPRLSASSGRSSDAEAPHGPPDDGGAGGKGGSLPRSATPGPPGEHLVNGRMDFAFPGSTNSLHRMTTTSAAAYGTHLSPHVPHRVLSTSSTLTRDYNSLTRSEHSHSTTLPRDYSTLTSVSSHDSRLTAGVPDTPTRLVFSALGPTSLRVSWQEPRCERPLQGYSVEYQLLNGGELHRLNIPNPAQTSVVVEDLLPNHSYVFRVRAQSQEGWGREREGVITIESQVHPQSPLCPLPGSAFTLSTPSAPGPLVFTALSPDSLQLSWERPRRPNGDIVGYLVTCEMAQGGGPATAFRVDGDSPESRLTVPGLSENVPYKFKVQARTTEGFGPEREGIITIESQDGGPFPQLGSRAGLFQHPLQSEYSSITTTHTSATEPFLVDGLTLGAQHLEAGGSLTRHVTQEFVSRTLTTSGTLSTHMDQQFFQT

SEQ ID NO: 165 - DNA, 5913 bp, Homo sapiens
gtggacgcagcgggctttggaaaggccccaagttaatgaggcgtgcgccggctgccgagcgcctcttggagctgggctttcccccgcggtgcgggcgccaggagccgccttttccgctgggtgtcactcgggggtggggaagatggcccattcaaaagcgccgcgagggggcccggccagtgcccttcagtgagcgctcgcaagaggacggcagaggcccggcagctcggagctccgggaccttgtggcgcatcaggacgcggctgtccctctgccgggacccagagccgccgccgccgctctgcctcctgcgtgttagcctcctctgcgcgctccgggcaggcggccgtgggagccgctggggcgaggacggcgcgaggctgctgctgctgcccccggcccgcgcggctggaaacggagaggccgagccaagcggcggcccctcttatgctgggaggatgctggagagtagcggctgcaaagcgctgaaggagggcgtgctggagaagcgcagcgacgggttgttgcagctctggaagaaaaagtgttgcatcctcaccgaggaagggctgctgcttatcccgcccaagcagctgcaacaccagcagcagcagcagcaacagcagcagcagcagcagcaacaacagcccgggcaggggccggccgagccgtcccaacccagtggccccgctgtcgccagcctcgagccgccggtcaagctcaaggaactgcacttctccaacatgaagaccgtggactgtgtggagcgcaagggcaagtacatgtacttcactgtggtgatggcagagggcaaggagatcgactttcggtgcccgcaagaccagggctggaacgccgagatcacgctgcagatggtgcagtacaagaatcgtcaggccatcctggcggtcaaatccacgcggcagaagcagcagcacctggtccagcagcagcccccctcgcagccgcagccgcagccgcagctccagccccaaccccagcctcagcctcagccgcaaccccagccccaatcacaaccccagcctcagccccaacccaagcctcagccccagcagctccacccgtatccgcatccacatccacatccacactctcatcctcactcgcacccacaccctcacccgcacccgcatccgcaccaaataccgcacccacacccacagccgcactcgcagccgcacgggcaccggcttctccgcagcacctccaactctgcctgaaaggggcagctcccgggcaagacaaggttttgaggacttgaggaagtgggacgagcacatttctattgtcttcacttggatcaaaagcaaaacagtctctccgccccgcaccagatcaagtagtttggacatcaccctactgaaaacttgcgattcttcttagttttctgcatacttttcatcacgatgcaggaaacgatttcgagtcaagaagacttttatttatgaacctttgaaaggatcgtcttgtatggtgaattttctaggagcgatgatgtactgtaattttattttaatgtattttgatttatgattatttattagtttttttttaaatgcttgttctaagacatttctgaatgtagaccattttccaaaaaggaaactttattttcaaaaacctaatccgtagtaattcctaatcttggagaataaaaaagggcggtggaggggaaaacattaagaatttattcattatttctcgagtactttcagaaagtctgacactttcattgttgtgccagctggttgaaattaaaactctgatattactttttttgaggatttttatttttgtttttgcttaaacatatagtttgtctagaagtttaaaaagctaaaagttaaaaatggtgtaattatgaaaatctaacactcaagatagtttctaaaaggaaatcagtagttaaggatacctgatttcaaaatatttaaagcataacctaactgatggtaggatgattgtatcttgaatatgtggtagggccacatctattgtaggaaaaccttgcttttatcatctgtgtgtaaagggcttaataaggagaagaggccttttgactgatttgtgagtataaatgcatttgctgtttcatttcaaaaatgttgtggaggaaaagagtacatttaacttgtataagagaatatttgtactcctgtccaggctgcaggacctttcttcgagagctttgcacacttgacttgaaccacattttctgatccctttactttgttttagaagcacactgaaaaatctcgttgtttaaagtacaatttgtaaatatttcaaaggtctaggagtcataacttttgttttcatactgaaaatgatgttgatcagagaaaccaactgttttgcttttcattgctctgtgagaaatttgaggattctgttttgctgttaggtaagctaaactcagaaattgaaaaggaaaagactggataaacacaggattttcagtaagaaaacaaccccagtcttgtcttagaagccacttgttgaggagtctgttgggggaaaaaagaggatatgcttttaaaggtagaacaaaccttcttctgtgttaaatcaaaaggatgttcaaaatccaccaggacagatgctacttgggtttaaatggagccatagatgatacaaagtcctcttggggctgaaaatcacttcctatttgcatggctttactaactggtttctgttttccattatctttttcacagaaagtcttggtcagtatttttccagcatttaaattgaaacggtcagtattagaccactgctaggttatgtagtcaagaaataaaaatagaattacatgctacagatgtctttattctccttccatctagaaaggagttccaaggtcaaattactttttagtgcaatagttaaatgacattttgagatcataactcatatccaaaaagttgcagggaaaattaaaatagctttcccctattaagctaatggcaaacaaaacttaagtggacccccacttccagtggttgtttaggttgcagttgtgaaaatatgctgccaacatttaaaaacttgtttcatatgtatatatgtatacacatatatgaatatgtatgtatatatacatatatgagaacatgtgtgtacacatatatgaatatgtatatatgtgtatgtatgtatatatgtatatgaaatgagagccacatctaaagatttcttaaatcaagtttggttcagcttccttagaactgtggctgtactttttgaggagtacctcatagtactatatttttaatgcatgcaaatcataatagctccaaatgaaccacagttttttcccaatggaggatttttttttaattcttgtactaaaaaaaaaaaatccataccaaatatttttacaaattaagattgatgtaggttttaaaaaaggcatttgtatgttgttagcttacatatggggctaggtaatttcattgcttaaaaagatgcgcctaggctccctcttggtggctggatttctttttcttcgcccgtggtggccatggttcttaatagggccaccggaatcatggtttctttttttttttttttttttgagatggagtctcgccctgtgacccaggctggagtgcagtggcacgatctcggctcactgcaacctctgcctcctgggttcacgccattctcctgtctcagcctcctgagtagctgggactacaggtgaatgccaccacgcccggctgatttttgtatttttagtagagatggggtttcaccatagtggtcaggctgttctcgaactcctgacctcaggtgatccacctgccttggcctcccaaagtgctaggattacaggtgtgagccaccacacccggccccagaataatggtttcttgactttctgtagcccttgttccttagtctgctgtgatatttatgttgacctttatcattttctattctgaacccctcttagcatttaatgtgaaatctaagaaattagaagtagaatggcttttattgttttgacacctttgaaattattattaataatttttccagagcaaaaaagcaaacacgctcaataagactaaacaaaacaaaatataaatgtacatcatttaatgtcccagtggctctattctacctgtaagaaaatgatacaaaaccacctaagatattttgaagcctgacaaatcagcttcatggaaaaaggtaaaaaatgcatttttcaaccgaaagggcagatccaatagaagacccgctccttaaataaacataaaatgtaaaaagttggaaaattaagagtaatgttccatctggaaactgaacttttgtccttgaacttgtgttggcaccaagcctcatacacagtgagctcaataactgttgggacaaaggaaggaaggacaaaatgtgtaacttcccagcatctgggagatgctgtctcttgcctcactgagtgttccttttctttgctctcatgtcattccctgagaacaatgaattctgggacaggctaaacatcatgatgaagtttcttaaacagactttcttagtggaaatccatttagatctgggtgtgctctatggggagtgctgacgtcaaagagcaaatgtctataaggggcccttttaaaatgaacattttcctcattgagcaagctgggattctctaatgtagaaatcaagccatctttataatttcacttcagatgtttatgtttttgttttttttgtctccaatgatggtaaaaataaaaactacgcattacttaaaggagtttccctcacatgtaaacactgttaggaagtctggattaagttgaaagtcctgttttaactttttttctctcatataccaaacactctgtatttctcttaaagaagccctttaagagaaagccctaattttatatctgacagtaaagtttgctgcaagtgtatgagttcaaacacatcccttgttttctgtccctaggggaaaagtcatgtagttttagcttggctccagtgttaatattatattcagtagcagccttagaagagtggtctaagacttgaacctggagcaattttatagcacagaatcctacgaagataggactgtgaacatttgttttctttttcgtgtgtgtcaaactaactggtttttgctttaccaataaaatgtcctcggcagagtaaattttaaacgtgaaaattatagatcttgatattgaatccatcagtgattcaagagatacacctatttgcctaaaacaacctaagatgtattggttatggaatcatgtgttggataggttcttaagacctgtttcctcaaatcttgacacagttttcaagggtggcttattgacttgcacggttgggcagataatccagatttacctaagattgggtaaaaaagtcatctgtgactttgctggcagggcatttgctaagtggagtacaggatctaaaagggttttcttagaaagggcaatattgtccaatgaagtaagcagaaggactctgggttagaagcatctgcacaaaaactggtgagacctactctccactgctctgcagctggatggctgatggcaggctgagcagtggggaagcaggttttaacaacagggagtccttccaggtcactgtatattgagaagaaacataaaactattgtctgttacattccgaggtcagccttcttcttaacgttttataatatgcaaatgccagcttctggaaagcaagtatcatcatgtaccaaatgctttatacaccatcacattcatgaattttttagcatggtcagaacttgtgtaaatatgtctcttagatgattttggggagatgtgatttatttttcatattttcaaaatgcatttcatttcaaataaagttatctattgagacaaccga

SEQ ID NO: 166 - protein, 401 aa, Homo sapiens
MRRAPAAERLLELGFPPRCGRQEPPFPLGVTRGWGRWPIQKRREGARPVPFSERSQEDGRGPAARSSGTLWRIRTRLSLCRDPEPPPPLCLLRVSLLCALRAGGRGSRWGEDGARLLLLPPARAAGNGEAEPSGGPSYAGRMLESSGCKALKEGVLEKRSDGLLQLWKKKCCILTEEGLLLIPPKQLQHQQQQQQQQQQQQQQQPGQGPAEPSQPSGPAVASLEPPVKLKELHFSNMKTVDCVERKGKYMYFTVVMAEGKEIDFRCPQDQGWNAEITLQMVQYKNRQAILAVKSTRQKQQHLVQQQPPSQPQPQPQLQPQPQPQPQPQPQPQSQPQPQPQPKPQPQQLHPYPHPHPHPHSHPHSHPHPHPHPHPHQIPHPHPQPHSQPHGHRLLRSTSNSA

SEQ ID NO: 167 - DNA, 836 bp, Homo sapiens
ccagccttcagccggagaaccgtttactcgctgctgtgcccatctatcagcaggctccgggctgaagattgcttctcttctctcctccaaggtctagtgacggagcccgcgcgcggcgccaccatgcggcagaaggcggtatcgcttttcttgtgctacctgctgctcttcacttgcagtggggtggaggcaggtaagaaaaagtgctcggagagctcggacagcggctccgggttctggaaggccctgaccttcatggccgtcggaggaggactcgcagtcgccgggctgcccgcgctgggcttcaccggcgccggcatcgcggccaactcggtggctgcctcgctgatgagctggtctgcgatcctgaatgggggcggcgtgcccgccggggggctagtggccacgctgcagagcctcggggctggtggcagcagcgtcgtcataggtaatattggtgccctgatgggctacgccacccacaagtatctcgatagtgaggaggatgaggagtagccagcagctcccagaacctcttcttccttcttggcctaactcttccagttaggatctagaactttgcctttttttttttttttttttttttgagatgggttctcactatattgtccaggctagagtgcagtggctattcacagatgcgaacatagtacactgcagcctccaactcctagcctcaagtgatcctcctgtctcaacctcccaagtaggattacaagcatgcgccgacgatgcccagaatccagaactttgtctatcactctccccaacaacctagatgtgaaaacagaataaacttcacccagaaaacactt

SEQ ID NO: 168 - protein, 130 aa, Homo sapiens
MRQKAVSLFLCYLLLFTCSGVEAGKKKCSESSDSGSGFWKALTFMAVGGGLAVAGLPALGFTGAGIAANSVAASLMSWSAILNGGGVPAGGLVATLQSLGAGGSSVVIGNIGALMGYATHKYLDSEEDEE

SEQ ID NO: 169 - DNA, 4644 bp, Homo sapiens
ggcggcggctggaggagagcgcggtggagagccgagcgggcgggcggcgggtgcggagcgggcgagggagcgcgcgcggccgccacaaagctcgggcgccgcggggctgcatgcggcgtacctggcccggcgcggcgactgctctccgggctggcgggggccggccgcgagccccgggggccccgaggccgcagcttgcctgcgcgctctgagccttcgcaactcgcgagcaaagtttggtggaggcaacgccaagcctgagtcctttcttcctctcgttccccaaatccgagggcagcccgcgggcgtcatgcccgcgctcctccgcagcctggggtacgcgtgaagcccgggaggcttggcgccggcgaagacccaaggaccactcttctgcgtttggagttgctccccgcaaccccgggctcgtcgctttctccatcccgacccacgcggggcgcggggacaacacaggtcgcggaggagcgttgccattcaagtgactgcagcagcagcggcagcgcctcggttcctgagcccaccgcaggctgaaggcattgcgcgtagtccatgcccgtagaggaagtgtgcagatgggattaacgtccacatggagatatggaagaggaccggggattggtaccgtaaccatggtcagctggggtcgtttcatctgcctggtcgtggtcaccatggcaaccttgtccctggcccggccctccttcagtttagttgaggataccacattagagccagaagagccaccaaccaaataccaaatctctcaaccagaagtgtacgtggctgcgccaggggagtcgctagaggtgcgctgcctgttgaaagatgccgccgtgatcagttggactaaggatggggtgcacttggggcccaacaataggacagtgcttattggggagtacttgcagataaagggcgccacgcctagagactccggcctctatgcttgtactgccagtaggactgtagacagtgaaacttggtacttcatggtgaatgtcacagatgccatctcatccggagatgatgaggatgacaccgatggtgcggaagattttgtcagtgagaacagtaacaacaagagagcaccatactggaccaacacagaaaagatggaaaagcggctccatgctgtgcctgcggccaacactgtcaagtttcgctgcccagccggggggaacccaatgccaaccatgcggtggctgaaaaacgggaaggagtttaagcaggagcatcgcattggaggctacaaggtacgaaaccagcactggagcctcattatggaaagtgtggtcccatctgacaagggaaattatacctgtgtagtggagaatgaatacgggtccatcaatcacacgtaccacctggatgttgtggagcgatcgcctcaccggcccatcctccaagccggactgccggcaaatgcctccacagtggtcggaggagacgtagagtttgtctgcaaggtttacagtgatgcccagccccacatccagtggatcaagcacgtggaaaagaacggcagtaaatacgggcccgacgggctgccctacctcaaggttctcaaggccgccggtgttaacaccacggacaaagagattgaggttctctatattcggaatgtaacttttgaggacgctggggaatatacgtgcttggcgggtaattctattgggatatcctttcactctgcatggttgacagttctgccagcgcctggaagagaaaaggagattacagcttccccagactacctggagatagccatttactgcataggggtcttcttaatcgcctgtatggtggtaacagtcatcctgtgccgaatgaagaacacgaccaagaagccagacttcagcagccagccggctgtgcacaagctgaccaaacgtatccccctgcggagacaggtaacagtttcggctgagtccagctcctccatgaactccaacaccccgctggtgaggataacaacacgcctctcttcaacggcagacacccccatgctggcaggggtctccgagtatgaacttccagaggacccaaaatgggagtttccaagagataagctgacactgggcaagcccctgggagaaggttgctttgggcaagtggtcatggcggaagcagtgggaattgacaaagacaagcccaaggaggcggtcaccgtggccgtgaagatgttgaaagatgatgccacagagaaagacctttctgatctggtgtcagagatggagatgatgaagatgattgggaaacacaagaatatcataaatcttcttggagcctgcacacaggatgggcctctctatgtcatagttgagtatgcctctaaaggcaacctccgagaatacctccgagcccggaggccacccgggatggagtactcctatgacattaaccgtgttcctgaggagcagatgaccttcaaggacttggtgtcatgcacctaccagctggccagaggcatggagtacttggcttcccaaaaatgtattcatcgagatttagcagccagaaatgttttggtaacagaaaacaatgtgatgaaaatagcagactttggactcgccagagatatcaacaatatagactattacaaaaagaccaccaatgggcggcttccagtcaagtggatggctccagaagccctgtttgatagagtatacactcatcagagtgatgtctggtccttcggggtgttaatgtgggagatcttcactttagggggctcgccctacccagggattcccgtggaggaactttttaagctgctgaaggaaggacacagaatggataagccagccaactgcaccaacgaactgtacatgatgatgagggactgttggcatgcagtgccctcccagagaccaacgttcaagcagttggtagaagacttggatcgaattctcactctcacaaccaatgaggaatacttggacctcagccaacctctcgaacagtattcacctagttaccctgacacaagaagttcttgttcttcaggagatgattctgttttttctccagaccccatgccttacgaaccatgccttcctcagtatccacacataaacggcagtgttaaaacatgaatgactgtgtctgcctgtccccaaacaggacagcactgggaacctagctacactgagcagggagaccatgcctcccagagcttgttgtctccacttgtatatatggatcagaggagtaaataattggaaaagtaatcagcatatgtgtaaagatttatacagttgaaaacttgtaatcttccccaggaggagaagaaggtttctggagcagtggactgccacaagccaccatgtaacccctctcacctgccgtgcgtactggctgtggaccagtaggactcaaggtggacgtgcgttctgccttccttgttaattttgtaataattggagaagatttatgtcagcacacacttacagagcacaaatgcagtatataggtgctggatgtatgtaaatatattcaaattatgtataaatatatattatatatttacaaggagttattttttgtattgattttaaatggatgtcccaatgcacctagaaaattggtctctctttttttaatagctatttgctaaatgctgttcttacacataatttcttaattttcaccgagcagaggtggaaaaatacttttgctttcagggaaaatggtataacgttaatttattaataaattggtaatatacaaaacaattaatcatttatagttttttttgtaatttaagtggcatttctatgcaggcagcacagcagactagttaatctattgcttggacttaactagttatcagatcctttgaaaagagaatatttacaatatatgactaatttggggaaaatgaagttttgatttatttgtgtttaaatgctgctgtcagacgattgttcttagacctcctaaatgccccatattaaaagaactcattcataggaaggtgtttcattttggtgtgcaaccctgtcattacgtcaacgcaacgtctaactggacttcccaagataaatggtaccagcgtcctcttaaaagatgccttaatccattccttgaggacagaccttagttgaaatgatagcagaatgtgcttctctctggcagctggccttctgcttctgagttgcacattaatcagattagcctgtattctcttcagtgaattttgataatggcttccagactctttggcgttggagacgcctgttaggatcttcaagtcccatcatagaaaattgaaacacagagttgttctgctgatagttttggggatacgtccatctttttaagggattgctttcatctaattctggcaggacctcaccaaaagatccagcctcatacctacatcagacaaaatatcgccgttgttccttctgtactaaagtattgtgttttgctttggaaacacccactcactttgcaatagccgtgcaagatgaatgcagattacactgatcttatgtgttacaaaattggagaaagtatttaataaaacctgttaatttttatactgacaataaaaatgtttctacagatattaatgttaacaagacaaaataaatgtcacgcaacttaaaaaaaaaaaaaaaa

SEQ ID NO: 170 - protein, 821 aa, Homo sapiens
MVSWGRFICLVVVTMATLSLARPSFSLVEDTTLEPEEPPTKYQISQPEVYVAAPGESLEVRCLLKDAAVISWTKDGVHLGPNNRTVLIGEYLQIKGATPRDSGLYACTASRTVDSETWYFMVNVTDAISSGDDEDDTDGAEDFVSENSNNKRAPYWTNTEKMEKRLHAVPAANTVKFRCPAGGNPMPTMRWLKNGKEFKQEHRIGGYKVRNQHWSLIMESVVPSDKGNYTCVVENEYGSINHTYHLDVVERSPHRPILQAGLPANASTVVGGDVEFVCKVYSDAQPHIQWIKHVEKNGSKYGPDGLPYLKVLKAAGVNTTDKEIEVLYIRNVTFEDAGEYTCLAGNSIGISFHSAWLTVLPAPGREKEITASPDYLEIAIYCIGVFLIACMVVTVILCRMKNTTKKPDFSSQPAVHKLTKRIPLRRQVTVSAESSSSMNSNTPLVRITTRLSSTADTPMLAGVSEYELPEDPKWEFPRDKLTLGKPLGEGCFGQVVMAEAVGIDKDKPKEAVTVAVKMLKDDATEKDLSDLVSEMEMMKMIGKHKNIINLLGACTQDGPLYVIVEYASKGNLREYLRARRPPGMEYSYDINRVPEEQMTFKDLVSCTYQLARGMEYLASQKCIHRDLAARNVLVTENNVMKIADFGLARDINNIDYYKKTTNGRLPVKWMAPEALFDRVYTHQSDVWSFGVLMWEIFTLGGSPYPGIPVEELFKLLKEGHRMDKPANCTNELYMMMRDCWHAVPSQRPTFKQLVEDLDRILTLTTNEEYLDLSQPLEQYSPSYPDTRSSCSSGDDSVFSPDPMPYEPCLPQYPHINGSVKT

SEQ ID NO: 171 - DNA, 6256 bp, Homo sapiens
cgcgccgccgctcgctcacctgcgctcccgcccgcccctcggtgcgcgcccggcccgccagccgccgccgcccgcaccccgagcgccaccatgaactcgctcttcaggaagagaaacaaaggcaaatacagccccactgtgcagacccggagcatctctaacaaggagctctcggagctgatcgagcagctgcagaagaatgccgaccaggtggagaagaacatcgtggacacagaggccaagatgcagagtgacctggctcggctgcaggagggtcggcagcctgagcaccgggacgtgaccctgcagaaggtgttggactctgagaagctgctctatgtgctagaggcggatgcggccattgccaagcacatgaagcacccacagggggacatgatcgccgaggatatccgccagctgaaggagcgtgtgaccaacctgcgcgggaaacacaagcagatctacaggctggcggtgaaggaagtggatccacaggtcaactgggcggcactggtggaggagaagctggacaagctgaacaaccagagctttgggactgacctgccgctggtggaccaccaagtggaggagcataacatcttccacaatgaggtcaaggccatcgggccccacctggccaaggacggggacaaggagcagaacagcgaactccgggccaagtaccagaaactgctggcagcatcacaggcccggcagcagcacctgagttcgctgcaggactacatgcagcgctgcaccaatgagctgtactggctggaccagcaggccaagggccgcatgcagtacgactggagtgaccgcaacctcgactaccccagccgccggcgccagtatgagaatttcatcaaccggaacctggaggccaaagaggagagaatcaacaaactgcacagcgagggcgaccagctgctggcggccgagcaccccgggaggaactccattgaggcgcacatggaggctgtgcacgcagactggaaggagtacctgaacctgctcatctgcgaggagagccacctcaagtacatggaggactaccaccagtttcacgaagacgtgaaggacgctcaggagctgctgcgcaaggtggactcggacctgaaccagaagtatggccctgacttcaaggaccggtaccagattgagctgctgctgcgggagctggatgaccaggagaaggtgctggacaagtatgaggacgtggtgcaggggctgcagaagcgaggccagcaggtggtgcccctcaagtaccgccgggagactccgctcaagcccatccccgtggaggcactctgtgactttgagggggagcagggcctgatctcgcggggctacagctacaccctgcagaagaacaacggggagagctgggagctcatggacagcgctgggaacaagctgattgctccggccgtgtgttttgtgatcccccccacagaccctgaggccctggctctggctgacagcctgggcagccagtaccggagcgtgcggcagaaggcagctgggagcaaacgcacgctgcagcagcggtatgaggtgctgaagaccgagaatcccggagatgcctctgacctacaggggcggcagctgctggctggcttggacaaggtggccagcgacctggaccggcaggagaaggccatcacagggatcctgcggccaccactggagcaaggccgggctgtgcaggacagtgccgagcgggccaaggacctcaagaacatcaccaacgagctactgcggattgaacctgagaagacgcggagcacggctgagggcgaagccttcatccaggccctcccaggcagtggcaccacacccctgctgaggacccgggtggaggacaccaaccggaaatacgagcacctcctgcagctgctggacttggcccaggagaaggttgatgtggccaaccgcctggagaagagcctgcagcagagctgggagttgctggccacacacgagaaccatctgaatcaggatgacacagtgcctgagagcagccgtgtcctggacagcaaggggcaggagctggcggccatggcctgtgagttacaggcccagaagtccctcctgggtgaggtggagcagaacttgcaggcggccaagcagtgctcgagcacactggccagccgcttccaggagcactgtccggacctggagcgccaggaggccgaggtgcacaagctgggccagcgtttcaacaacctgcgccagcaggtggaacgcagggcgcagagcctacagagcgccaaggcagcctacgagcacttccaccgcggccatgaccacgtgctgcagttcctagtcagcatccccagttacgagccccaggagacagacagcctcagccagatggagaccaagctgaagaaccagaagaacctgctagatgagatagcaagtagggagcaggaagtacagaagatctgtgccaattcccagcagtaccagcaagctgtaaaggactatgagttagaagcagaaaaactaaggtctcttctcgacttggagaatggaaggagcagccacgtgagcaagagagccaggctccaatctcctgccaccaaagtgaaggaagaggaagcagcacttgccgccaagttcactgaagtttatgccatcaacagacagaggctgcagaatctggagtttgctctgaatctcctcagacagcagccggaagtagaagtgacccatgagaccctgcaaaggaataggccggactctggagtggaggaggcgtggaagatcaggaaggaactggatgaggagactgagcggaggcggcagctggagaacgaggtcaagagcacccaggaagaaatctggaccttgaggaatcaggggcctcaggaatcggtggtgaggaaggaggtgctcaagaaggtgccggatcccgtgctggaggagagcttccagcagctgcagcggacgctggcagaggagcagcacaagaaccagctgctgcaggaggagctggaggcactgcagctgcagctgcgtgccctggagcaggagaccagagacggggggcaggagtacgtggtcaaggaggtcctgcgcatcgagcctgacagggcccaggcggatgaggtcttgcagctgcgggaggagctggaggcactgaggcggcagaagggcgcccgggaggcagaggtgctcctcctgcagcagcgtgtggccgccctggctgaagagaagagccgggcgcaggagaaggtcacagagaaagaggtggtgaaactgcagaatgacccccagctggaggcagagtaccagcagctgcaggaggaccaccagcgccaggaccagctcagggagaagcaggaggaggagctgagcttcctccaggacaagctcaagaggctagagaaggagcgggccatggccgagggcaagatcaccgtcaaggaggtgctcaaggtggagaaggacgcggccaccgagagggaggtcagcgatctcacccgccaatatgaggacgaggctgccaaggctcgcgctagccagagggagaagacggagctgctccgaaagatatgggccttggaggaggagaacgccaaagtggtggtgcaggagaaggtgcgggagatcgtgcggccagaccccaaggcggaaagtgaagtggcgaacctccgcctggagcttgtggagcaggagcgaaagtaccggggtgccgaggagcagctccggagctaccagagtgagctggaggccctcaggaggcgaggcccccaggtggaagtcaaagaggtgactaaggaagtcattaagtacaagactgaccctgagatggagaaggagcttcagcggctcagggaggagatcgtggacaagaccagactgatcgaaaggtgtgatttagagatctaccagctgaaaaaggaaatccaggccctgaaagacaccaaaccccaggtccagaccaaagaggtggtccaggagatcctccaattccaagaagaccctcaaaccaaggaggaggtggcgtctctgagggcaaagctctcagaggagcagaagaaacaagtggatctggagagggaaagagcttcccaggaagagcagatcgcccggaaagaggaggagctctcgcgggtgaaggaaagggtggtgcagcaggaggtggtcaggtatgaggaggagccaggcctgcgggccgaggcgagcgcctttgccgagagcatcgatgtggagctgcggcagattgacaagctgcgggcagagctgcggcggctgcagcgccggcgcaccgagcttgagcggcagctggaggagctagagcgcgagcggcaggcccgcagggaggccgagcgcgaggtacagcggttgcagcagcggctggcagcgctggagcaggaagaagctgaggcccgtgagaaggtaacccatacgcagaaggtggtgctgcagcaggacccgcagcaggcgcgagagcatgccctgctccgactccagctggaagaagagcagcaccggcggcagctcctggagggggagctcgagaccctccggaggaaactggctgcactggagaaggcggaggtcaaggagaaggtggtgctctccgagagtgtccaggtggagaagggcgacaccgagcaagagatccagaggctcaagagcagcctggaggaggagagccgcagcaagcgcgagctggacgtcgaggtgagccggctggaagccaggctttcggagctggaattccataactccaagtcatccaaggaactagactttctgagggaagagaaccacaaattacagctggagaggcaaaacctgcagctggagacccgaaggctccaatcggaaatcaacatggcagcgacggaaacacgagacctgcggaacatgaccgtggcggactctgggaccaaccatgactccagactgtggtccctggagagggaactggatgacctcaagaggctctccaaggacaaagacctcgagatcgacgagctgcagaagcgcctgggctccgtggccgtcaagcgggagcagcgggagaaccacctgcggcgctccatcgtagtcatccaccctgacacaggccgcgagctgtccccggaggaagcccaccgtgccgggctcattgactggaacatgttcgtgaaactcagaagccaggagtgcgactgggaggagatctcagtgaagggtcccaatggggagtcctcagtgatacacgacaggaagtctggcaagaagttctccatcgaagaggccctgcagagtggcaggctgacccctgctcagtatgaccgctatgtcaacaaggatatgtccatccaggagctggcggtcttggtatctgggcagaagtaggcacagctcttgcaactcttcgtaacggcagacgctggccctctcctacgacgcagtgacctccttggtgtcgtcctctccctagccctggtgcaggccaagcattttatacataccctcgctgccaggctgctcagagtcccgcccacatatgagacaggcactggctgaagacaggcaactctcgtcccaaccatcattcaccctgagtgacgtacttcatcctccaatgactggacaactgcgatgccttttcctcccttttcctgtacactcccagcaacaaactcctcatgataactgcacacaatctgaaaaccactgaaggacaagccaaccacagcagccaagcccactccttgcagcatgggtactggtggcacaccagacagtgacactgccccacaaaggcctgggcccgtgggggctgctgcctggcatgacatctctccagatttctggcttaaaaccaactttccatccgagaagcctcctcagtagttactctgctcatgagacagatctgggctccaagccaggaaaggtgaacagaaaccacaagtgtccagccctcggtgctggagtggacgttaattgtcagccaccagactgtcccggcacctacagagaatgtttcacagttctggcatttaaatcctttgatagtggattgtgctgctgttagccttagtttcagtgctttacaagtctcgcttattatctcactggtatttaggtatacaaaacagttgattattcaccacgccaatatctgggtctctgtatctcatgtagaacataagaaaatgggaactaatagggaaatttatttatagcatgaaaataaacctggtggctggagtctgcttgtacggtcaaaaaaaaaaaaaaaaaa

SEQ ID NO: 172 - protein, 1756 aa, Homo sapiens
MNSLFRKRNKGKYSPTVQTRSISNKELSELIEQLQKNADQVEKNIVDTEAKMQSDLARLQEGRQPEHRDVTLQKVLDSEKLLYVLEADAAIAKHMKHPQGDMIAEDIRQLKERVTNLRGKHKQIYRLAVKEVDPQVNWAALVEEKLDKLNNQSFGTDLPLVDHQVEEHNIFHNEVKAIGPHLAKDGDKEQNSELRAKYQKLLAASQARQQHLSSLQDYMQRCTNELYWLDQQAKGRMQYDWSDRNLDYPSRRRQYENFINRNLEAKEERINKLHSEGDQLLAAEHPGRNSIEAHMEAVHADWKEYLNLLICEESHLKYMEDYHQFHEDVKDAQELLRKVDSDLNQKYGPDFKDRYQIELLLRELDDQEKVLDKYEDVVQGLQKRGQQVVPLKYRRETPLKPIPVEALCDFEGEQGLISRGYSYTLQKNNGESWELMDSAGNKLIAPAVCFVIPPTDPEALALADSLGSQYRSVRQKAAGSKRTLQQRYEVLKTENPGDASDLQGRQLLAGLDKVASDLDRQEKAITGILRPPLEQGRAVQDSAERAKDLKNITNELLRIEPEKTRSTAEGEAFIQALPGSGTTPLLRTRVEDTNRKYEHLLQLLDLAQEKVDVANRLEKSLQQSWELLATHENHLNQDDTVPESSRVLDSKGQELAAMACELQAQKSLLGEVEQNLQAAKQCSSTLASRFQEHCPDLERQEAEVHKLGQRFNNLRQQVERRAQSLQSAKAAYEHFHRGHDHVLQFLVSIPSYEPQETDSLSQMETKLKNQKNLLDEIASREQEVQKICANSQQYQQAVKDYELEAEKLRSLLDLENGRSSHVSKRARLQSPATKVKEEEAALAAKFTEVYAINRQRLQNLEFALNLLRQQPEVEVTHETLQRNRPDSGVEEAWKIRKELDEETERRRQLENEVKSTQEEIWTLRNQGPQESVVRKEVLKKVPDPVLEESFQQLQRTLAEEQHKNQLLQEELEALQLQLRALEQETRDGGQEYVVKEVLRIEPDRAQADEVLQLREELEALRRQKGAREAEVLLLQQRVAALAEEKSRAQEKVTEKEVVKLQNDPQLEAEYQQLQEDHQRQDQLREKQEEELSFLQDKLKRLEKERAMAEGKITVKEVLKVEKDAATEREVSDLTRQYEDEAAKARASQREKTELLRKIWALEEENAKVVVQEKVREIVRPDPKAESEVANLRLELVEQERKYRGAEEQLRSYQSELEALRRRGPQVEVKEVTKEVIKYKTDPEMEKELQRLREEIVDKTRLIERCDLEIYQLKKEIQALKDTKPQVQTKEVVQEILQFQEDPQTKEEVASLRAKLSEEQKKQVDLERERASQEEQIARKEEELSRVKERVVQQEVVRYEEEPGLRAEASAFAESIDVELRQIDKLRAELRRLQRRRTELERQLEELERERQARREAEREVQRLQQRLAALEQEEAEAREKVTHTQKVVLQQDPQQAREHALLRLQLEEEQHRRQLLEGELETLRRKLAALEKAEVKEKVVLSESVQVEKGDTEQEIQRLKSSLEEESRSKRELDVEVSRLEARLSELEFHNSKSSKELDFLREENHKLQLERQNLQLETRRLQSEINMAATETRDLRNMTVADSGTNHDSRLWSLERELDDLKRLSKDKDLEIDELQKRLGSVAVKREQRENHLRRSIVVIHPDTGRELSPEEAHRAGLIDWNMFVKLRSQECDWEEISVKGPNGESSVIHDRKSGKKFSIEEALQSGRLTPAQYDRYVNKDMSIQELAVLVSGQK

SEQ ID NO: 173 - DNA, 1810 bp, Homo sapiens
ccagcgctgctccccgggcgctcctccccgggcgctcctccccaggcctcccgggcgcttggatcccggccatctccgcacccttcaagtgggtgtgggtgatttcctggcggggggagcagccaggtgagcccaagatgctgctgcgctcgaagcctgcgctgccgccgccgctgatgctgctgctcctggggccgctgggtcccctctcccctggcgccctgccccgacctgcgcaagcacaggacgtcgtggacctggacttcttcacccaggagccgctgcacctggtgagcccctcgttcctgtccgtcaccattgacgccaacctggccacggacccgcggttcctcatcctcctgggttctccaaagcttcgtaccttggccagaggcttgtctcctgcgtacctgaggtttggtggcaccaagacagacttcctaattttcgatcccaagaaggaatcaacctttgaagagagaagttactggcaatctcaagtcaaccaggatatttgcaaatatggatccatccctcctgatgtggaggagaagttacggttggaatggccctaccaggagcaattgctactccgagaacactaccagaaaaagttcaagaacagcacctactcaagaagctctgtagatgtgctatacacttttgcaaactgctcaggactggacttgatctttggcctaaatgcgttattaagaacagcagatttgcagtggaacagttctaatgctcagttgctcctggactactgctcttccaaggggtataacatttcttgggaactaggcaatgaacctaacagtttccttaagaaggctgatattttcatcaatgggtcgcagttaggagaagattttattcaattgcataaacttctaagaaagtccaccttcaaaaatgcaaaactctatggtcctgatgttggtcagcctcgaagaaagacggctaagatgctgaagagcttcctgaaggctggtggagaagtgattgattcagttacatggcatcactactatttgaatggacggactgctaccaaggaagattttctaaaccctgatgtattggacatttttatttcatctgtgcaaaaagttttccaggtggttgagagcaccaggcctggcaagaaggtctggttaggagaaacaagctctgcatatggaggcggagcgcccttgctatccgacacctttgcagctggctttatgtggctggataaattgggcctgtcagcccgaatgggaatagaagtggtgatgaggcaagtattctttggagcaggaaactaccatttagtggatgaaaacttcgatcctttacctgattattggctatctcttctgttcaagaaattggtgggcaccaaggtgttaatggcaagcgtgcaaggttcaaagagaaggaagcttcgagtataccttcattgcacaaacactgacaatccaaggtataaagaaggagatttaactctgtatgccataaacctccataatgtcaccaagtacttgcggttaccctatcctttttctaacaagcaagtggataaataccttctaagacctttgggacctcatggattactttccaaatctgtccaactcaatggtctaactctaaagatggtggatgatcaaaccttgccacctttaatggaaaaacctctccggccaggaagttcactgggcttgccagctttctcatatagtttttttgtgataagaaatgccaaagttgctgcttgcatctgaaaataaaatatactagtcctgacaaaaaaaaaaaaaaaaaa

SEQ ID NO: 174 - protein, 543 aa, Homo sapiens
MLLRSKPALPPPLMLLLLGPLGPLSPGALPRPAQAQDVVDLDFFTQEPLHLVSPSFLSVTIDANLATDPRFLILLGSPKLRTLARGLSPAYLRFGGTKTDFLIFDPKKESTFEERSYWQSQVNQDICKYGSIPPDVEEKLRLEWPYQEQLLLREHYQKKFKNSTYSRSSVDVLYTFANCSGLDLIFGLNALLRTADLQWNSSNAQLLLDYCSSKGYNISWELGNEPNSFLKKADIFINGSQLGEDFIQLHKLLRKSTFKNAKLYGPDVGQPRRKTAKMLKSFLKAGGEVIDSVTWHHYYLNGRTATKEDFLNPDVLDIFISSVQKVFQVVESTRPGKKVWLGETSSAYGGGAPLLSDTFAAGFMWLDKLGLSARMGIEVVMRQVFFGAGNYHLVDENFDPLPDYWLSLLFKKLVGTKVLMASVQGSKRRKLRVYLHCTNTDNPRYKEGDLTLYAINLHNVTKYLRLPYPFSNKQVDKYLLRPLGPHGLLSKSVQLNGLTLKMVDDQTLPPLMEKPLRPGSSLGLPAFSYSFFVIRNAKVAACI

SEQ ID NO: 175 - DNA, 1426 bp, Homo sapiens
ggatccgcgtgctaaagaaaaatcgccgttaaagcagttttctttttcactgtctttttcttttcgcggggaacccagctgttcctgcgagggccacctcctcaggaagaccccgcagctctcccgcggcgcttctgcaggaggcagcgacagtttcgagaacccgggccttcccctcccagtgcctccgggggttcgcgtttcaggcgctcgtgttttccgggaagggcaggcgcgctgggccttggggagctgcgctcggcgggcggaccgggggatcatggaagctgataaagatgacacacaacaaattcttaaggagcattcgccagatgaatttataaaagatgaacaaaataagggactaattgatgaaattacaaagaaaaatattcagctaaagaaggagatccaaaagcttgaaacggagttacaagaggctaccaaagaattccagattaaagaggatattcctgaaacaaagatgaaattcttatcagttgaaactcctgagaatgacagccagttgtcaaatatctcctgttcgtttcaagtgagctcgaaagttccttatgagatacaaaaaggacaagcacttatcacctttgaaaaagaagaagttgctcaaaatgtggtaagcatgagtaaacatcatgtacagataaaagatgtaaatctggaggttacggccaagccagttccattaaattcaggagtcagattccaggtttatgtagaagtttctaaaatgaaaatcaatgttactgaaattcctgacacactgcgtgaagatcaaatgagagacaaactagagctgagcttttcaaagttccgaaatggaggcggagaggtggaccgcgtggactatgacagacagtccgggagtgcagtcatcacgtttgtggagattggagtggctgacaagattttgaaaaagaaagaataccctctttatataaatcaaacctgccatagagttactgtttctccatacacagaaatacacttgaaaaagtatcagatattttcaggaacatctaagaggacagtgcttctgacaggaatggaaggcattcaaatggatgaagaaattgtggaggatttaattaacattcactttcaacgggcaaagaatggaggtggagaagtagatgtggtcaagtgttctctaggtcaacctcacatagcatactttgaagaatagacttaacagaatcatgaaaactatagctttttaacccggattactgtaaatgtttgacaagaatgaatatgcttttccttaaaaaatgaaaactttaatttttaccatccatttatgtttagatacaaaacttatttccatgtttctgaatcttctttgtttcaaatggtgctgcatgttttcaactacaataagtgcactgtaataaaaagttttgtttat

SEQ ID NO: 176 - protein, 307 aa, Homo sapiens
MEADKDDTQQILKEHSPDEFIKDEQNKGLIDEITKKNIQLKKEIQKLETELQEATKEFQIKEDIPETKMKFLSVETPENDSQLSNISCSFQVSSKVPYEIQKGQALITFEKEEVAQNVVSMSKHHVQIKDVNLEVTAKPVPLNSGVRFQVYVEVSKMKINVTEIPDTLREDQMRDKLELSFSKFRNGGGEVDRVDYDRQSGSAVITFVEIGVADKILKKKEYPLYINQTCHRVTVSPYTEIHLKKYQIFSGTSKRTVLLTGMEGIQMDEEIVEDLINIHFQRAKNGGGEVDVVKCSLGQPHIAYFEE

SEQ ID NO: 177 - DNA, 2077 bp, Homo sapiens
ccgagcgccagcgcggggaaccgggaaaaggaaaccgtgttgtgtacgtaagattcaggaaacgaaaccaggagccgcgggtgttggcgcaaaggttactcccagacccttttccggctgacttctgagaaggttgcgcacagctgtgcccggcagtctagaggcgcagaagaggaagccatcgcctggccccggctctctggaccttgtctcgctcgggagcggaaacagcggcagccagagaactgttttaatcatggacaaacaaaactcacagatgaatgcttctcacccggaaacaaacttgccagttgggtatcctcctcagtatccaccgacagcattccaaggacctccaggatatagtggctaccctgggccccaggtcagctacccacccccaccagccggccattcaggtcctggcccagctggctttcctgtcccaaatcagccagtgtataatcagccagtatataatcagccagttggagctgcaggggtaccatggatgccagcgccacagcctccattaaactgtccacctggattagaatatttaagtcagatagatcagatactgattcatcagcaaattgaacttctggaagttttaacaggttttgaaactaataacaaatatgaaattaagaacagctttggacagagggtttactttgcagcggaagatactgattgctgtacccgaaattgctgtgggccatctagaccttttaccttgaggattattgataatatgggtcaagaagtcataactctggagagaccactaagatgtagcagctgttgttgtccctgctgccttcaggagatagaaatccaagctcctcctggtgtaccaataggttatgttattcagacttggcacccatgtctaccaaagtttacaattcaaaatgagaaaagagaggatgtactaaaaataagtggtccatgtgttgtgtgcagctgttgtggagatgttgattttgagattaaatctcttgatgaacagtgtgtggttggcaaaatttccaagcactggactggaattttgagagaggcatttacagacgctgataactttggaatccagttccctttagaccttgatgttaaaatgaaagctgtaatgattggtgcctgtttcctcattgacttcatgttttttgaaagcactggcagccaggaacaaaaatcaggagtgtggtagtggattagtgaaagtctcctcaggaaatctgaagtctgtatattgattgagactatctaaactcatacctgtatgaattaagctgtaaggcctgtagctctggttgtatacttttgcttttcaaattatagtttatcttctgtataactgatttataaaggtttttgtacattttttaatactcattgtcaatttgagaaaaaggacatatgagtttttgcatttattaatgaaacttcctttgaaaaactgctttgaattatgatctctgattcattgtccattttactaccaaatattaactaaggccttattaatttttatataaattatatcttgtcctattaaatctagttacaatttatttcatgcataagagctaatgttattttgcaaatgccatatattcaaaaaagctcaaagataattttctttactattatgttcaaataatattcaatatgcatattatctttaaaaagttaaatgtttttttaatcttcaagaaatcatgctacacttaacttctcctagaagctaatctataccataatattttcatattcacaagatattaaattaccaattttcaaattattgttagtaaagaacaaaatgattctctcccaaagaaagacacattttaaatactccttcactctaaaactctggtattataacttttgaaagttaatatttctacatgaaatgtttagctcttacactctatccttcctagaaaatggtaattgagattactcagatattaattaaatacaatatcatatatatattcacagagtataaacctaaataatgatctattagattcaaatatttgaaataaaaacttgatttttttgt

SEQ ID NO: 178 - protein, 318 aa, Homo sapiens
MDKQNSQMNASHPETNLPVGYPPQYPPTAFQGPPGYSGYPGPQVSYPPPPAGHSGPGPAGFPVPNQPVYNQPVYNQPVGAAGVPWMPAPQPPLNCPPGLEYLSQIDQILIHQQIELLEVLTGFETNNKYEIKNSFGQRVYFAAEDTDCCTRNCCGPSRPFTLRIIDNMGQEVITLERPLRCSSCCCPCCLQEIEIQAPPGVPIGYVIQTWHPCLPKFTIQNEKREDVLKISGPCVVCSCCGDVDFEIKSLDEQCVVGKISKHWTGILREAFTDADNFGIQFPLDLDVKMKAVMIGACFLIDFMFFESTGSQEQKSGVW

SEQ ID NO: 179 - DNA, 1270 bp, Homo sapiens
attttctaaaagggacagagagcaccctgctacatttcctaatcaagaagttggcgtgcagctgggagagctagactaagttggtcatgatgcagaagctactcaaatgcagtcggcttgtcctggctcttgccctcatcctggttctggaatcctcagttcaaggttatcctacgcggagagccaggtaccaatgggtgcgctgcaatccagacagtaattctgcaaactgccttgaagaaaaaggaccaatgttcgaactacttccaggtgaatccaacaagatcccccgtctgaggactgacctttttccaaagacgagaatccaggacttgaatcgtatcttcccactttctgaggactactctggatcaggcttcggctccggctccggctctggatcaggatctgggagtggcttcctaacggaaatggaacaggattaccaactagtagacgaaagtgatgctttccatgacaaccttaggtctcttgacaggaatctgccctcagacagccaggacttgggtcaacatggattagaagaggattttatgttataaaagaggattttcccaccttgacaccaggcaatgtagttagcatattttatgtaccatggttatatgattaatcttgggacaaagaattttatagaaatttttaaacatctgaaaaagaagcttaagttttatcatccttttttttctcatgaattcttaaaggattatgctttaatgctgttatctattttattgttcttgaaaatacctgcattttttggtatcatgttcaaccaacatcattatgaaattaattagattcccatggccataaaatggctttaaagaatatatatatatttttaaagtagcttgagaagcaaattggcaggtaatatttcatacctaaattaagactctgacttggattgtgaattataatgatatgccccttttcttataaaaacaaaaaaaaaaataatgaaacacagtgaatttgtagagtgggggtatttgacatattttacagggtggagtgtactatatactattacctttgaatgtgtttgcagagctagtggatgtgtttgtctacaagtatgattgctgttacataacaccccaaattaactcccaaattaaaacacagttgtgctgtcaatacctcatactgctttacctttttttcctggatatctgtgtattttcaaatgttactatatattaaagcagaaatataaccaaaggttaaaaaaaaaaaaaaaaaa

SEQ ID NO: 180 - protein, 158 aa, Homo sapiens
MMQKLLKCSRLVLALALILVLESSVQGYPTRRARYQWVRCNPDSNSANCLEEKGPMFELLPGESNKIPRLRTDLFPKTRIQDLNRIFPLSEDYSGSGFGSGSGSGSGSGSGFLTEMEQDYQLVDESDAFHDNLRSLDRNLPSDSQDLGQHGLEEDFML

SEQ ID NO: 181 - DNA, 2379 bp, Homo sapiens
gagagtcggcgcccgcaacgcggagccgggaagtcgtcgctactctggtggaactcagagttggttctggaggcggcggacgcggaggtccctcagaggatccagcgaggggcgccaacaagaggcgaagaggtggcaccagggcggcggcaggaagaggagcgggagcaggagcgcggagcggagcgtcccgacccgccgtgcgtactttctggagggaaggggcgggggaatcggcccctgagggaagcgcccggtggcgagggggttagccaagttccggctgcggcgccactccctcggttccacgagaggaaagttttttttttccagacgcttccgccggctcgcgccctccgggcccagcctcccgagccttcggagcgggcgccgtcccagcccagctccggggaaacgcgagccgcgatgcctggggggtgctcccggggccccgccgccggggacgggcgtctgcggctggcgcgactagcgctggtactcctgggctgggtctcctcgtcttctcccacctcctcggcatcctccttctcctcctcggcgccgttcctggcttccgccgtgtccgcccagcccccgctgccggaccagtgccccgcgctgtgcgagtgctccgaggcagcgcgcacagtcaagtgcgttaaccgcaatctgaccgaggtgcccacggacctgcccgcctacgtgcgcaacctcttccttaccggcaaccagctggccgtgctccctgccggcgccttcgcccgccggccgccgctggcggagctggccgcgctcaacctcagcggcagccgcctggacgaggtgcgcgcgggcgccttcgagcatctgcccagcctgcgccagctcgacctcagccacaacccactggccgacctcagtcccttcgctttctcgggcagcaatgccagcgtctcggcccccagtccccttgtggaactgatcctgaaccacatcgtgccccctgaagatgagcggcagaaccggagcttcgagggcatggtggtggcggccctgctggcgggccgtgcactgcaggggctccgccgcttggagctggccagcaaccacttcctttacctgccgcgggatgtgctggcccaactgcccagcctcaggcacctggacttaagtaataattcgctggtgagcctgacctacgtgtccttccgcaacctgacacatctagaaagcctccacctggaggacaatgccctcaaggtccttcacaatggcaccctggctgagttgcaaggtctaccccacattagggttttcctggacaacaatccctgggtctgcgactgccacatggcagacatggtgacctggctcaaggaaacagaggtagtgcagggcaaagaccggctcacctgtgcatatccggaaaaaatgaggaatcgggtcctcttggaactcaacagtgctgacctggactgtgacccgattcttcccccatccctgcaaacctcttatgtcttcctgggtattgttttagccctgataggcgctattttcctcctggttttgtatttgaaccgcaaggggataaaaaagtggatgcataacatcagagatgcctgcagggatcacatggaagggtatcattacagatatgaaatcaatgcggaccccagattaacgaacctcagttctaactcggatgtctgagaaatattagaggacagaccaaggacaactctgcatgagatgtagacttaagctttatccctactaggcttgctccactttcatcctccactatagatacaacggactttgactaaaagcagtgaaggggatttgcttccttgttatgtaaagtttctcggtgtgttctgttaatgtaagacgatgaacagttgtgtatagtgttttaccctcttctttttcttggaactcctcaacacgtatggagggatttttcaggtttcagcatgaacatgggcttcttgctgtctgtctctctctcagtacagttcaaggtgtagcaagtgtacccacacagatagcattcaacaaaagctgcctcaactttttcgagaaaaatactttattcataaatatcagttttattctcatgtacctaagttgtggagaaaataattgcatcctataaactgcctgcagacgttagcaggctcttcaaaataactccatggtgcacaggagcacctgcatccaagagcatgcttacattttactgttctgcatattacaaaaaataacttgcaacttcataacttctttgacaaagtaaattacttttttgattgcagtttatatgaaaatgtactgatttttttttaataaactgcatcgagatccaaccgactgaattgttaaaaaaaaaaaaaaaaa

SEQ ID NO: 182 - protein, 420 aa, Homo sapiens
MPGGCSRGPAAGDGRLRLARLALVLLGWVSSSSPTSSASSFSSSAPFLASAVSAQPPLPDQCPALCECSEAARTVKCVNRNLTEVPTDLPAYVRNLFLTGNQLAVLPAGAFARRPPLAELAALNLSGSRLDEVRAGAFEHLPSLRQLDLSHNPLADLSPFAFSGSNASVSAPSPLVELILNHIVPPEDERQNRSFEGMVVAALLAGRALQGLRRLELASNHFLYLPRDVLAQLPSLRHLDLSNNSLVSLTYVSFRNLTHLESLHLEDNALKVLHNGTLAELQGLPHIRVFLDNNPWVCDCHMADMVTWLKETEVVQGKDRLTCAYPEKMRNRVLLELNSADLDCDPILPPSLQTSYVFLGIVLALIGAIFLLVLYLNRKGIKKWMHNIRDACRDHMEGYHYRYEINADPRLTNLSSNSDV

SEQ ID NO: 183 - DNA, 4759 bp, Homo sapiens
tagttattaaagttcctatgcagctccgcctcgcgtccggcctcatttcctcggaaaatccctgctttccccgctcgccacgccctcctcctacccggctttaaagctagtgaggcacagcctgcggggaacgtagctagctgcaagcagaggccggcatgaccaccgagcagcgacgcagcctgcaagccttccaggattatatccggaagaccctggaccctacctacatcctgagctacatggccccctggtttagggaggaagaggtgcagtatattcaggctgagaaaaacaacaagggcccaatggaggctgccacactttttctcaagttcctgttggagctccaggaggaaggctggttccgtggctttttggatgccctagaccatgcaggttattctggactttatgaagccattgaaagttgggatttcaaaaaaattgaaaagttggaggagtatagattacttttaaaacgtttacaaccagaatttaaaaccagaattatcccaaccgatatcatttctgatctgtctgaatgtttaattaatcaggaatgtgaagaaattctacagatttgctctactaaggggatgatggcaggtgcagagaaattggtggaatgccttctcagatcagacaaggaaaactggcccaaaactttgaaacttgctttggagaaagaaaggaacaagttcagtgaactgtggattgtagagaaaggtataaaagatgttgaaacagaagatcttgaggataagatggaaacttctgacatacagattttctaccaagaagatccagaatgccagaatcttagtgagaattcatgtccaccttcagaagtgtctgatacaaacttgtacagcccatttaaaccaagaaattaccaattagagcttgctttgcctgctatgaaaggaaaaaacacaataatatgtgctcctacaggttgtggaaaaacctttgtttcactgcttatatgtgaacatcatcttaaaaaattcccacaaggacaaaaggggaaagttgtcttttttgcgaatcagatcccagtgtatgaacagcagaaatctgtattctcaaaatactttgaaagacatgggtatagagttacaggcatttctggagcaacagctgagaatgtcccagtggaacagattgttgagaacaatgacatcatcattttaactccacagattcttgtgaacaaccttaaaaagggaacgattccatcactatccatctttactttgatgatatttgatgaatgccacaacactagtaaacaacacccgtacaatatgatcatgtttaattatctagatcagaaacttggaggatcttcaggcccactgccccaggtcattgggctgactgcctcggttggtgttggggatgccaaaaacacagatgaagccttggattatatctgcaagctgtgtgcttctcttgatgcgtcagtgatagcaacagtcaaacacaatctggaggaactggagcaagttgtttataagccccagaagtttttcaggaaagtggaatcacggattagcgacaaatttaaatacatcatagctcagctgatgagggacacagagagtctggcaaagagaatctgcaaagacctcgaaaacttatctcaaattcaaaatagggaatttggaacacagaaatatgaacaatggattgttacagttcagaaagcatgcatggtgttccagatgccagacaaagatgaagagagcaggatttgtaaagccctgtttttatacacttcacatttgcggaaatataatgatgccctcattatcagtgagcatgcacgaatgaaagatgctctggattacttgaaagacttcttcagcaatgtccgagcagcaggattcgatgagattgagcaagatcttactcagagatttgaagaaaagctgcaggaactagaaagtgtttccagggatcccagcaatgagaatcctaaacttgaagacctctgcttcatcttacaagaagagtaccacttaaacccagagacaataacaattctctttgtgaaaaccagagcacttgtggacgctttaaaaaattggattgaaggaaatcctaaactcagttttctaaaacctggcatattgactggacgtggcaaaacaaatcagaacacaggaatgaccctcccggcacagaagtgtatattggatgcattcaaagccagtggagatcacaatattctgattgccacctcagttgctgatgaaggcattgacattgcacagtgcaatcttgtcatcctttatgagtatgtgggcaatgtcatcaaaatgatccaaaccagaggcagaggaagagcaagaggtagcaagtgcttccttctgactagtaatgctggtgtaattgaaaaagaacaaataaacatgtacaaagaaaaaatgatgaatgactctattttacgccttcagacatgggacgaagcagtatttagggaaaagattctgcatatacagactcatgaaaaattcatcagagatagtcaagaaaaaccaaaacctgtacctgataaggaaaataaaaaactgctctgcagaaagtgcaaagccttggcatgttacacagctgacgtaagagtgatagaggaatgccattacactgtgcttggagatgcttttaaggaatgctttgtgagtagaccacatcccaagccaaagcagttttcaagttttgaaaaaagagcaaagatattctgtgcccgacagaactgcagccatgactggggaatccatgtgaagtacaagacatttgagattccagttataaaaattgaaagttttgtggtggaggatattgcaactggagttcagacactgtactcgaagtggaaggactttcattttgagaagataccatttgatccagcagaaatgtccaaatgatatcaggtcctcaatcttcagctacagggaatgagtaactttgagtggagaagaaacaaacatagtgggtataatcatggatcgcttgtacccctgtgaaaatatattttttaaaaatatctttagcagtttgtactatattatatatgcaaagcacaaatgagtgaatcacagcactgagtattttgtaggccaacagagctcatagtacttgggaaaaattaaaaagcctcatttctagccttctttttagagtcaactgccaacaaacacacagtaatcactctgtacacactgggatagatgaatgaatggaatgttgggaatttttatctccctttgtctccttaacctactgtaaactggcttttgcccttaacaatctactgaaattgttcttttgaaggttaccagtgactctggttgccaaatccactgggcacttcttaaccttctatttgacctctgcgcatttggccctgttgagcactcttcttgaagctctccctgggcttctctctcttctagttctattctagtctttttttattgagtcctcctctttgctgatcccttccaagggttcaatatatatacatgtatatactgtacatatgtatatgtaactaatatacatacatacaggtatgtatatgtaatggttatatgtactcatgttcctggtgtagcaacgtgtggtatggctacacagagaacatgagaacataaagccatttttatgcttactactaaaagctgtccactgtagagttgctgtatgtagcaatgtgtatccactctacagtggtcagcttttagtagagagcataaaaatgataaaatacttcttgaaaacttagtttactatacatcttgccctattaatatgttctcttaacgtgtgccattgttctctttgaccattttcctataatgatgttgatgttcaacacctggactgaatgtctgttctcagatcccttggatgttacagatgaggcagtctgactgtcctttctacttgaaagattagaatatgtatccaaatggcattcacgtgtcacttagcaaggtttgctgatgcttcaaagagcttagtttgcggtttcctggacgtggaaacaagtatctgagttccctggagatcaacgggatgaggtgttacagctgcctccctcttcatgcaatctggtgagcagtggtgcaggcggggagccagagaaacttgccagttatataacttctctttggcttttcttcatctgtaaaacaaggataatactgaactgtaagggttagtggagagtttttaattaaaagaatgtgtgaaaagtacatgacacagtagttgcttgataatagttactagtagtagtattcttactaagacccaatacaaatggattatttaaaccaagtttatgagttggttttttttcattttctatttgtattttattaagagtgtcttttcttatgtgattttttttaattgctatttgatatggtttggctatatgtccccacccaaatctcatcttgaattataatccccatgtgtcaagggagggacctgacgggaggtgattggatcacgggggcagttgtccccatgctgttcttgggatagtgagttagttctcatgagatctgatggttttataagtgtttgacaattcctcctttacacacactctctctctcatctgctgccatgtaagacttgcctgcttccccttctgccatgattgtaagtttcctgaggcctcctcagccatgtggaactgtgaatctattaagcctcttttctttataaatgaaaa

SEQ ID NO: 184 - protein, 925 aa, Homo sapiens
MTTEQRRSLQAFQDYIRKTLDPTYILSYMAPWFREEEVQYIQAEKNNKGPMEAATLFLKFLLELQEEGWFRGFLDALDHAGYSGLYEAIESWDFKKIEKLEEYRLLLKRLQPEFKTRIIPTDIISDLSECLINQECEEILQICSTKGMMAGAEKLVECLLRSDKENWPKTLKLALEKERNKFSELWIVEKGIKDVETEDLEDKMETSDIQIFYQEDPECQNLSENSCPPSEVSDTNLYSPFKPRNYQLELALPAMKGKNTIICAPTGCGKTFVSLLICEHHLKKFPQGQKGKVVFFANQIPVYEQQKSVFSKYFERHGYRVTGISGATAENVPVEQIVENNDIIILTPQILVNNLKKGTIPSLSIFTLMIFDECHNTSKQHPYNMIMFNYLDQKLGGSSGPLPQVIGLTASVGVGDAKNTDEALDYICKLCASLDASVIATVKHNLEELEQVVYKPQKFFRKVESRISDKFKYIIAQLMRDTESLAKRICKDLENLSQIQNREFGTQKYEQWIVTVQKACMVFQMPDKDEESRICKALFLYTSHLRKYNDALIISEHARMKDALDYLKDFFSNVRAAGFDEIEQDLTQRFEEKLQELESVSRDPSNENPKLEDLCFILQEEYHLNPETITILFVKTRALVDALKNWIEGNPKLSFLKPGILTGRGKTNQNTGMTLPAQKCILDAFKASGDHNILIATSVADEGIDIAQCNLVILYEYVGNVIKMIQTRGRGRARGSKCFLLTSNAGVIEKEQINMYKEKMMNDSILRLQTWDEAVFREKILHIQTHEKFIRDSQEKPKPVPDKENKKLLCRKCKALACYTADVRVIEECHYTVLGDAFKECFVSRPHPKPKQFSSFEKRAKIFCARQNCSHDWGIHVKYKTFEIPVIKIESFVVEDIATGVQTLYSKWKDFHFEKIPFDPAEMSK

SEQ ID NO: 185 - DNA, 3547 bp, Homo sapiens
gcactcgcccggctcgcccgctttcgcacccagttcacgcgccacagctatgtgtccccgagccgcgcgggcgcccgcgacgctactcctcgccctgggcgcggtgctgtggcctgcggctggcgcctgggagcttacgattttgcacaccaacgacgtgcacagccggctggagcagaccagcgaggactccagcaagtgcgtcaacgccagccgctgcatgggtggcgtggctcggctcttcaccaaggttcagcagatccgccgcgccgaacccaacgtgctgctgctggacgccggcgaccagtaccagggcactatctggttcaccgtgtacaagggcgccgaggtggcgcacttcatgaacgccctgcgctacgatgccatggcactgggaaatcatgaatttgataatggtgtggaaggactgatcgagccactcctcaaagaggccaaatttccaattctgagtgcaaacattaaagcaaaggggccactagcatctcaaatatcaggactttatttgccatataaagttcttcctgttggtgatgaagttgtgggaatcgttggatacacttccaaagaaaccccttttctctcaaatccagggacaaatttagtgtttgaagatgaaatcactgcattacaacctgaagtagataagttaaaaactctaaatgtgaacaaaattattgcactgggacattcgggttttgaaatggataaactcatcgctcagaaagtgaggggtgtggacgtcgtggtgggaggacactccaacacatttctttacacaggcaatccaccttccaaagaggtgcctgctgggaagtacccattcatagtcacttctgatgatgggcggaaggttcctgtagtccaggcctatgcttttggcaaatacctaggctatctgaagatcgagtttgatgaaagaggaaacgtcatctcttcccatggaaatcccattcttctaaacagcagcattcctgaagatccaagcataaaagcagacattaacaaatggaggataaaattggataattattctacccaggaattagggaaaacaattgtctatctggatggctcctctcaatcatgccgctttagagaatgcaacatgggcaacctgatttgtgatgcaatgattaacaacaacctgagacacacggatgaaatgttctggaaccacgtatccatgtgcattttaaatggaggtggtatccggtcgcccattgatgaacgcaacaatggcacaattacctgggagaacctggctgctgtattgccctttggaggcacatttgacctagtccagttaaaaggttccaccctgaagaaggcctttgagcatagcgtgcaccgctacggccagtccactggagagttcctgcaggtgggcggaatccatgtggtgtatgatctttcccgaaaacctggagacagagtagtcaaattagatgttctttgcaccaagtgtcgagtgcccagttatgaccctctcaaaatggacgaggtatataaggtgatcctcccaaacttcctggccaatggtggagatgggttccagatgataaaagatgaattattaagacatgactctggtgaccaagatatcaacgtggtttctacatatatctccaaaatgaaagtaatttatccagcagttgaaggtcggatcaagttttccacaggaagtcactgccatggaagcttttctttaatatttctttcactttgggcagtgatctttgttttataccaatagccaaaaattctccttgcctttaatgtgtgaaactgcattttttcaagtgagattcaaatctgccttttaggacctggctttgtgacagcaaaaaccatctttacaggctcctagaagctgaaggttagagcattataaaatgaagagacagacatgattactcagggtcagcaacctagtgagttagaaaaaaaattaacatagggccctataaggagaaagccaactatgttaagtttacgtgtccaaattttaatgaaattttactaacaattttaaaccatatttttcttcttcatatccatttctaatccatcaaacagcttatgtttacataaaattttatcattcacaaggaagttttaagcacactgtctcatttgatatccacaacttatttttggtaggaaagagagatgtttttcccacctgtcagatgaaaaaactgaagctcaaaaagggttgacttgaccatacagctaatgctgacagatccaagacctagacctaggtcttttgaactcaagtccagcattctcaactatatcaagttactgttcagaatacttaatatctcctctcttcataattatcaatagccccaagctcatggatgacaaatctctgctttatttcttgtctctattttttcactttatagctcctgttataatagcaagtttaatggtataaacacaggataccatcctctcttgcaacacccatgtgcctttgatgagtcaggtagcaagctgtagtagataatgagaaaggccagaggctgcaaagacagtcaaaggacacgagagaaaggaaggggaagaacaggactccaggactgttttatattatagaaaagcaagagctaaagagcatttacacatgttaaacagatacttgttaagcatagtgcctgacacacggcattagctgttattttatgagattccatcagctctgcctctgtcctctttcttctaacatgaaggtatcatgagaagagaaccttctaacataagctgtaattctaaacctgcacttgtccctctccagcaagaggctagcactgaattcattctactcatactacacacccagttatggaatgtccagagttctcgaagaaaataaatgactttaggaagaggtatacattttttaagtcgctctgcctccaaatctgaacagtcactgtaaatcattcttaagcccagatatgagaacttctgctggaaagtgggaccctctgagtgggtggtcagaaaatacccatgctgatgaaatgacctatgcccaaagaacaaatacttaacgtgggagtggaaccacatgagcctgctcagctctgcataagtaattcaagaaatgggaggcttcaccttaaaaacagtgtgcaaatggcagctagaggttttgataggaagtatgtttgtttcttagtgtttacaaatattaagtactcttgatacaaaatatacttttaaacttcataacctttttataaaagttgttgcagcaaaataatagcctcggttctatgcatatatggattgctataaaaaatgtcaataagattgtacaaggaaaattagagaaagtcacatttagggtttattttttacacttggccagtaaaatagggtaaatcctattagaaattttttaaagaactttttttaagtttcctaaatctgtgtgtgtattgtgaagtggtataagaaatgactttgaaccactttgcaattgtagattcccaacaataaaattgaagat

SEQ ID NO: 186 - protein, 574 aa, Homo sapiens
MCPRAARAPATLLLALGAVLWPAAGAWELTILHTNDVHSRLEQTSEDSSKCVNASRCMGGVARLFTKVQQIRRAEPNVLLLDAGDQYQGTIWFTVYKGAEVAHFMNALRYDAMALGNHEFDNGVEGLIEPLLKEAKFPILSANIKAKGPLASQISGLYLPYKVLPVGDEVVGIVGYTSKETPFLSNPGTNLVFEDEITALQPEVDKLKTLNVNKIIALGHSGFEMDKLIAQKVRGVDVVVGGHSNTFLYTGNPPSKEVPAGKYPFIVTSDDGRKVPVVQAYAFGKYLGYLKIEFDERGNVISSHGNPILLNSSIPEDPSIKADINKWRIKLDNYSTQELGKTIVYLDGSSQSCRFRECNMGNLICDAMINNNLRHTDEMFWNHVSMCILNGGGIRSPIDERNNGTITWENLAAVLPFGGTFDLVQLKGSTLKKAFEHSVHRYGQSTGEFLQVGGIHVVYDLSRKPGDRVVKLDVLCTKCRVPSYDPLKMDEVYKVILPNFLANGGDGFQMIKDELLRHDSGDQDINVVSTYISKMKVIYPAVEGRIKFSTGSHCHGSFSLIFLSLWAVIFVLYQ

SEQ ID NO: 187 - DNA, 2210 bp, Homo sapiens
agccgcggcctcaactaaaagtggccattgacctttcaagctttcgagcagtgatgcaatagaatagtatttcaaagaaaaatgcttatcgaaattttggatccggttttcccgtgattgttaagggtttcttttaaaaagtaggtcacatttcaagtaggtcatatttcgggggcgggtgcgcagacaaggagatgagtttccactaaggccagggggcctccaacggggttggaggtgagaatcccaggtagggtagaggtgccgagatccttccgaatcccagccctggggcgtcagccctgcagggaatggcagagacactctccggactgagggaaccgaggccagtcaccaagccccttccgggcgcgcaggcgatcagtgggtgaccgcggctgcgagggactttgtcatccgtcctccaggatctggggagaaagagccccatcccttctctctctgccaccatttcggacaccccgcagggactcgttttgggattcgcactgacttcaaggaaggacgcgaacccttctctgaccccagctcgggcggccacctgtctttgccgcggtgacccttctctcatgaccctgcggtgccttgagccctccgggaatggcggggaagggacgcggagccagtgggggaccgcggggtcggcggaggagccatccccgcaggcggcgcgtctggcgaaggccctgcgggagctcggtcagacaggatggtactggggaagtatgactgttaatgaagccaaagagaaattaaaagaggcaccagaaggaactttcttgattagagatagctcgcattcagactacctactaacaatatctgttaaaacatcagctggaccaactaatcttcgaatcgaataccaagacggaaaattcagattggactctatcatatgtgtcaaatccaagcttaaacaatttgacagtgtggttcatctgatcgactactatgttcagatgtgcaaggataagcggacaggtccagaagccccccggaacggcactgttcacctttatctgaccaaaccgctctacacgtcagcaccatctctgcagcatctctgtaggctcaccattaacaaatgtaccggtgccatctggggactgcctttaccaacaagactaaaagattacttggaagaatataaattccaggtataaatgtttctctttttttaaacatgtctcacatagagtatctccgaatgcagctatgtaaaagagaaccaaaacttgagtgctctggataactatatggaatgctttctaagaacagctgaagctaatctaatttaaatttaacagcttgaagaggtagctaggtgtttaaagttcctccagatacttttacctgagtgatgcttcccttcctaaggctgaccaagacctgttgatccttttagattaaaaataaaatgtcgcatgtaaaggctgaagtcgcgttttatcagaatgccttgccttcttaggttcttttccattatgtcaaaggtccaggctccagtaggagagaaagaactcctcataggaatactgaagaagtgggaaggaaccaagctgacacaggcctcactgcaatttgatatgcctgctgatcagagtctcttgggcattttatattttgcattctgatgtacctaggagttttgttaaacagatgatgtatgtgagtatttatcccattttatgcaattaaccaaatcaaccaaaaaaagtgaccatgaagtcctgtatttgtctttttactacatgtaggaactctcatgtgaatgagtactgtagtaatccattctatgggagccttatttcagaaatatttcaaactggtgcaaatggaaaagactttctcttttcctttaaagctaaagacaagaatatcatgctatacaggtgcaactcaatccccgttaataaaaaccaatgtaggtataggcattctaccctttgaaatagctgtgtcccaacctgttgccattgattttttggaaatggctttagaaatatccaagttgtccttgaattgtctaaccatggacataaacagttgtctcccttctactgtgtagaatactttgacttaattttcttccagatacagggggatacctgcctgtttttcaaagtgtttatttactgctgttactatttgattagaatgtattaaataaaaaaaacctgatttct

SEQ ID NO: 188 - protein, 198 aa, Homo sapiens
MTLRCLEPSGNGGEGTRSQWGTAGSAEEPSPQAARLAKALRELGQTGWYWGSMTVNEAKEKLKEAPEGTFLIRDSSHSDYLLTISVKTSAGPTNLRIEYQDGKFRLDSIICVKSKLKQFDSVVHLIDYYVQMCKDKRTGPEAPRNGTVHLYLTKPLYTSAPSLQHLCRLTINKCTGAIWGLPLPTRLKDYLEEYKFQV

SEQ ID NO: 189 - DNA, 1596 bp, Homo sapiens
ccgcgggacgcatgcgcacggcggacggaggcgagccggccggggcttcctccccggccggcagggtggacggtgggctccagatgggatcagagcggatggagatgcggaagcggcagatgcccgccgcccaggacacaccaggcgccgccccaggccagcccggagcggggagtcgcgggtccaacgcatgctgcttctgctggtgctgctgttgtagctgctcgtgtctcactgttagaaaccaggaagatcagaggcccacaatagcttcccacgaactcagagcagatcttccaacctgggaagaaagccctgctcctactctggaagaagtcaacgcctgggctcagtcatttgacaaattaatggtcactccagcaggaaggaatgcattccgtgaattcctccgaacagaattcagtgaggaaaatatgctcttctggatggcctgtgaggaactgaaaaaggaagctaataaaaacattattgaagagaaagcaaggataatctatgaagactacatttctatactttctcctaaggaggtgagcttagactcccgggtgagagaagtgatcaacagaaacatggtggagccatcccaacacatattcgatgatgctcaacttcagatttacaccctgatgcacagagactcatatcctcgattcatgaactctgctgtctataaggacttgcttcagtccttatcggagaaatctattgaagcataggatttttcaaatatatttattattaataaaataataaaagaattcatgggctacaactagcacagggaatttagaggttgtagcatcttctgctggagtaatactcaggctattctaataacagatgattccttcaacagactgctatatattcaccatgtaaactgcagccacctttagtgatacttttaaaaaaaaaaataaagggatatggctgttgtagaaagatagcgtatttgcatttacaataacagtagcatgttgtcagtggccaaggctacacagaaggctccctgctgcccggagcaggtacatccacagagcaaagggaaccacttttattttgcatgagtttggtaactgattactctcccctcaaagaaaagacattcaggtgtttctcaacgacatcttctgtccagcaagctcggtttgaatacgtcacttaccagtgccattgcaggacccaaattcacagttcataaaagatgtgaccactacatgtaaaaatagcattctacttgatcttacagtatgtatgtatgtatgtatggagacatatgtgtgcgtgtggatgtctacatggttaatggaaagcactgtgctctgaagtggatcagtctcaagtgtctggtaacagcagcaatgcttagaaaattcttttgttgaaaagagttactgttattatcagaatttgccaacctaaagaatgaatttttaaattcataacttggtcatgttcacaacaaaactgtcaaataagcatatttccatttttattactgaaagaaatatgggcattttcattctttaaagaaataaagcacaagaattttatctcaaaaaaaaaaaaaaaaaa

SEQ ID NO: 190 - protein, 241 aa, Homo sapiens
MRTADGGEPAGASSPAGRVDGGLQMGSERMEMRKRQMPAAQDTPGAAPGQPGAGSRGSNACCFCWCCCCSCSCLTVRNQEDQRPTIASHELRADLPTWEESPAPTLEEVNAWAQSFDKLMVTPAGRNAFREFLRTEFSEENMLFWMACEELKKEANKNIIEEKARIIYEDYISILSPKEVSLDSRVREVINRNMVEPSQHIFDDAQLQIYTLMHRDSYPRFMNSAVYKDLLQSLSEKSIEA

SEQ ID NO: 191 - DNA, 1904 bp, Homo sapiens
agctatttcaaggcgcgcgcctcgtggtggactcaccgctagcccgcagcgctcggcttcctggtaattcttcacctcttttctcagctccctgcagcatgggtgctgggccctccttgctgctcgccgccctcctgctgcttctctccggcgacggcgccgtgcgctgcgacacacctgccaactgcacctatcttgacctgctgggcacctgggtcttccaggtgggctccagcggttcccagcgcgatgtcaactgctcggttatgggaccacaagaaaaaaaagtagtggtgtaccttcagaagctggatacagcatatgatgaccttggcaattctggccatttcaccatcatttacaaccaaggctttgagattgtgttgaatgactacaagtggtttgccttttttaagtataaagaagagggcagcaaggtgaccacttactgcaacgagacaatgactgggtgggtgcatgatgtgttgggccggaactgggcttgtttcaccggaaagaaggtgggaactgcctctgagaatgtgtatgtcaacacagcacaccttaagaattctcaggaaaagtattctaataggctctacaagtatgatcacaactttgtgaaagctatcaatgccattcagaagtcttggactgcaactacatacatggaatatgagactcttaccctgggagatatgattaggagaagtggtggccacagtcgaaaaatcccaaggcccaaacctgcaccactgactgctgaaatacagcaaaagattttgcatttgccaacatcttgggactggagaaatgttcatggtatcaattttgtcagtcctgttcgaaaccaagcatcctgtggcagctgctactcatttgcttctatgggtatgctagaagcgagaatccgtatactaaccaacaattctcagaccccaatcctaagccctcaggaggttgtgtcttgtagccagtatgctcaaggctgtgaaggcggcttcccataccttattgcaggaaagtacgcccaagattttgggctggtggaagaagcttgcttcccctacacaggcactgattctccatgcaaaatgaaggaagactgctttcgttattactcctctgagtaccactatgtaggaggtttctatggaggctgcaatgaagccctgatgaagcttgagttggtccatcatgggcccatggcagttgcttttgaagtatatgatgacttcctccactacaaaaaggggatctaccaccacactggtctaagagaccctttcaacccctttgagctgactaatcatgctgttctgcttgtgggctatggcactgactcagcctctgggatggattactggattgttaaaaacagctggggcaccggctggggtgagaatggctacttccggatccgcagaggaactgatgagtgtgcaattgagagcatagcagtggcagccacaccaattcctaaattgtagggtatgccttccagtatttcataatgatctgcatcagttgtaaaggggaattggtatattcacagactgtagactttcagcagcaatctcagaagcttacaaatagatttccatgaagatatttgtcttcagaattaaaactgcccttaattttaatatacctttcaatcggccactggccatttttttctaagtattcaattaagtgggaattttctggaagatggtcagctatgaagtaatagagtttgcttaatcatttgtaattcaaacatgctatattttttaaaatcaatgtgaaaacatagacttatttttaaattgtaccaatcacaagaaaataatggcaataattatcaaaacttttaaaatagatgctcatatttttaaaataaagttttaaaaataactgca

SEQ ID NO: 192 - protein, 463 aa, Homo sapiens
MGAGPSLLLAALLLLLSGDGAVRCDTPANCTYLDLLGTWVFQVGSSGSQRDVNCSVMGPQEKKVVVYLQKLDTAYDDLGNSGHFTIIYNQGFEIVLNDYKWFAFFKYKEEGSKVTTYCNETMTGWVHDVLGRNWACFTGKKVGTASENVYVNTAHLKNSQEKYSNRLYKYDHNFVKAINAIQKSWTATTYMEYETLTLGDMIRRSGGHSRKIPRPKPAPLTAEIQQKILHLPTSWDWRNVHGINFVSPVRNQASCGSCYSFASMGMLEARIRILTNNSQTPILSPQEVVSCSQYAQGCEGGFPYLIAGKYAQDFGLVEEACFPYTGTDSPCKMKEDCFRYYSSEYHYVGGFYGGCNEALMKLELVHHGPMAVAFEVYDDFLHYKKGIYHHTGLRDPFNPFELTNHAVLLVGYGTDSASGMDYWIVKNSWGTGWGENGYFRIRRGTDECAIESIAVAATPIPKL

SEQ ID NO: 193 - DNA, 4879 bp, Homo sapiens
gagggaagcggctagaggatcggggagaaggagcattcgccggaggctggaggaggctgacccgcgtccccgcccagcctgctcctatgcggtacttgaaggatggcgaagaggtcgcgcagtgaggatgaggatgatgaccttcagtatgccgatcatgattatgaagtaccacaacaaaaaggactgaagaaactctggaacagagtaaaatggacaagggacgaggatgataaattaaagaagttggttgaacaacatggaactgatgattggactctaattgctagtcatcttcaaaatcgctctgattttcagtgccagcatcgatggcagaaagttttaaatcctgaattgataaagggtccttggactaaagaagaagatcagagggttattgaattagttcagaaatatgggccaaaaagatggtctttaattgcaaaacatttaaaaggaagaataggcaagcagtgtagagaaagatggcataatcatctgaatcctgaggtaaagaaatcttcctggacagaagaggaggacaggatcatctatgaagcacataagcggttgggaaatcgttgggcagaaattgccaaactacttccaggaaggactgataattctatcaaaaatcattggaattctactatgcgaagaaaagtggaacaggagggctatttacaagatggaataaaatcagaacgatcttcatctaaacttcaacacaaaccttgtgcagctatggatcatatgcaaacccagaatcagttttacatacctgttcagatccctgggtatcagtatgtgtcacctgaaggcaattgtatagaacatgttcagcctacttctgcctttattcagcaacccttcattgatgaagatcctgataaggaaaagaaaataaaggaacttgagatgcttcttatgtcagctgagaatgaagttagaagaaagcgaattccatcacagcctggaagtttttctagctggtctggtagtttcctcatggatgataacatgtctaatactctaaatagccttgacgagcacactagtgagttttacagtatggatgaaaatcagcctgtgtctgctcagcagaattcacccacaaagttcctggccgtggaggcaaacgctgtgttatcctctttgcagaccatcccagaatttgcagagactctagaacttattgaatctgatcctgtagcatggagtgacgttaccagttttgatatttctgatgctgctgcttctcctatcaaatccaccccagttaaattaatgagaattcagcacaatgaaggagccatggaatgccaatttaacgtcagtcttgtacttgaagggaaaaaaaacacttgtaatggtggcaacagtgaagctgttcctttaacatccccaaatatagccaagtttagcactccaccagccatcctcagaaagaagagaaaaatgcgagtgggtcattccccaggcagcgaacttagggatggctcattgaacgatggtggtaatatggcgctaaaacatacaccactgaaaacactaccattttctccttcacagtttttcaacacatgtcctggtaatgaacaacttaatatagaaaatccttcatttacatcaacccctatttgtgggcagaaagctctcattacaactcctcttcataaggaaacaactcccaaagatcaaaaggaaaatgtagggtttagaacacctactattagaagatctatactgggtaccacaccaagaactcctactccttttaagaatgcgcttgctgctcaggagaaaaaatatggacctcttaaaattgtgtcccagccacttgctttcttggaagaagatattcgggaagttttaaaagaagaaactggaacagacctattcctcaaagaggaagatgaacctgcttacaaaagctgcaaacaagagaataccgcttctgggaagaaagtcagaaaatcactagtcttagataattgggaaaaagaagaatcaggcactcaactgttgactgaagacatttcagacatgcagtcagaaaatagatttactacatccttattaatgataccattattggaaatacatgacaataggtgcaacttgattcctgaaaaacaagatataaattcaaccaacaaaacatatacacttactaaaaagaaaccaaaccctaacacttccaaagttgtcaaattggaaaagaatcttcagtcaaattgtgaatgggaaacagtggtttatgggaagacagaagaccaacttattatgactgaacaagcaagaagatatctgagtacttacacagctaccagtagtacttcaagagctctcatactgtaattgttattaaaattgatgaaatgccccactcccttactgcagtctctactaaattaggttgcagtgaaatttttctcaattagttgtttttaaagttgtaagatagcccttttaatacagcatcttttttctattctatatagtaggcagaaagctagtaagtcacttaaggggtagatagtttcatagtttattttttaagagatgagatttttaaaaattgtttttaaagaacaagatgggaaaataatagaatgttcatggatttctaaaagtaaattctcatatattttcttcacaagatatatgttgctactctcttgatgctgcagttttgttatagataggtgtatgagtatatatgatttctgaaattagtctatgtatggaaagcacacatgattttatgaagtacttttgcccatgtgctgatttacttaggctaccatttacaaagaaacacattgaaaaggaatttaaaggaaggatagaaagttgcactactaattttttgttttttttttcagaagcagtaaaattaactacagtgttaaatgtatttatttgagcatagtactgaaaacaaaaagcattcaaaaaagagttttttctttattagtaaatagtattttcttaatctcagaggagctgagagttttgttgaatgtattgtacagtatgtaggagcaggagaactttgtaaattggaaagaagtctgtttttataatttatttttatttttaaagcttaaatgtagatatttatacgtatacagggtgcctagaagccaatgttgtttcctgttattacagctaacacagtaaagaataattttgactttaagtatgaaacagtagtaagttatagctgcaaagaatacaatatctatactgtatgtcacatctacctaaatgttgcactatgccctttaaatcatgctggttataaagtagttctaaaaatgtactaaataataatttaatattttctttttaaattatatcgggggtggtcatatacattaatctggtgatttgtatatgtgtttgaaatttttgcattttgtttaaaaaataatatggtaccttggtccctaaaaacagtctgcacttagaagtttatatttactcagtgtttcagaagtggagaacattatcttttatttataaaaatattttgtccttttttaaatgttttgtgtttctctacaggttacaacagttgcttcagttgcctgttttaggtgtttgcacttattttatttcttcttgaaagaatttttatttgcttttgtggtagagattatatgtaattttttttcagtcatataatggtgtgctgtcaacttaaacactgacaggtaaatagaattgtacactgtagtttgaattatttataattgacacactctctccctctccactcctgaagtatgctgctatagaaaatagcagaatcggcttgctgctacgagagaaggaaagagcgaccaccacttgcactgtgtgaaaagataaaaaacaaatgatggcaagttctcaagttaactaaatggaatcaaccattaccaggcaaattcttgcaaataccaaaatactactatgccttataaaacaaaatgaaagcaggttaagattttctgctctgtttgtatgttaatagaaatggaaatactaagtattttaatgcttagctcttgaacagtagacctaaaagggttttaagctatttaaatctacttgctagtttttgcatattttatatatatatatatttatatatatatatagtgagaagtgaagaaaatgtatggtactaagattatgccttattgataaatagataaaccaatttgaatcctcttagcatgtttaagtatgttgattgctttctaattaatgaacttctcacagaaatttcacttagtgaaaccaatgattgtagcaaactcatactggatcatttcagttaccttgaactaatagcacataatggttttttgttgttgttgtttttaatgtagcccttacctggatatacatagtctgcaatcaccaaagtataatatcttgtaaggctatattttttaaagcatattttttcttgagcattaaattatcctaaatggtaatatattgtggataagtctgggcttattggacataatacatatttgggttggtactggttgaatccttcagttaactgctttgttgctttttgcaagattttttatcttaaacatgtcaggcatcttaagtcacctttatactgttttgttcctctgagtttctttcagtatgttatacaaatgccagacataacatgtagcagccatacttgcatggaaactgactacacatacataatactgcattttattgtaaggttttcacattaatacagcaattaccctgactaaattgagttttgtgatatatggaaaacttcattgtaagagaatcttgcatacaatgttgacatattaacatccaaaataaagcatctgtgtacaag

SEQ ID NO: 194 - protein, 752 aa, Homo sapiens
MAKRSRSEDEDDDLQYADHDYEVPQQKGLKKLWNRVKWTRDEDDKLKKLVEQHGTDDWTLIASHLQNRSDFQCQHRWQKVLNPELIKGPWTKEEDQRVIELVQKYGPKRWSLIAKHLKGRIGKQCRERWHNHLNPEVKKSSWTEEEDRIIYEAHKRLGNRWAEIAKLLPGRTDNSIKNHWNSTMRRKVEQEGYLQDGIKSERSSSKLQHKPCAAMDHMQTQNQFYIPVQIPGYQYVSPEGNCIEHVQPTSAFIQQPFIDEDPDKEKKIKELEMLLMSAENEVRRKRIPSQPGSFSSWSGSFLMDDNMSNTLNSLDEHTSEFYSMDENQPVSAQQNSPTKFLAVEANAVLSSLQTIPEFAETLELIESDPVAWSDVTSFDISDAAASPIKSTPVKLMRIQHNEGAMECQFNVSLVLEGKKNTCNGGNSEAVPLTSPNIAKFSTPPAILRKKRKMRVGHSPGSELRDGSLNDGGNMALKHTPLKTLPFSPSQFFNTCPGNEQLNIENPSFTSTPICGQKALITTPLHKETTPKDQKENVGFRTPTIRRSILGTTPRTPTPFKNALAAQEKKYGPLKIVSQPLAFLEEDIREVLKEETGTDLFLKEEDEPAYKSCKQENTASGKKVRKSLVLDNWEKEESGTQLLTEDISDMQSENRFTTSLLMIPLLEIHDNRCNLIPEKQDINSTNKTYTLTKKKPNPNTSKVVKLEKNLQSNCEWETVVYGKTEDQLIMTEQARRYLSTYTATSSTSRALIL

SEQ ID NO: 195 - DNA, 1498 bp, Homo sapiens
accaaacctcttcgaggcacaaggcacaacaggctgctctgggattctcttcagccaatcttcattgctcaagtgtctgaagcagccatggcagaagtacctgagctcgccagtgaaatgatggcttattacagtggcaatgaggatgacttgttctttgaagctgatggccctaaacagatgaagtgctccttccaggacctggacctctgccctctggatggcggcatccagctacgaatctccgaccaccactacagcaagggcttcaggcaggccgcgtcagttgttgtggccatggacaagctgaggaagatgctggttccctgcccacagaccttccaggagaatgacctgagcaccttctttcccttcatctttgaagaagaacctatcttcttcgacacatgggataacgaggcttatgtgcacgatgcacctgtacgatcactgaactgcacgctccgggactcacagcaaaaaagcttggtgatgtctggtccatatgaactgaaagctctccacctccagggacaggatatggagcaacaagtggtgttctccatgtcctttgtacaaggagaagaaagtaatgacaaaatacctgtggccttgggcctcaaggaaaagaatctgtacctgtcctgcgtgttgaaagatgataagcccactctacagctggagagtgtagatcccaaaaattacccaaagaagaagatggaaaagcgatttgtcttcaacaagatagaaatcaataacaagctggaatttgagtctgcccagttccccaactggtacatcagcacctctcaagcagaaaacatgcccgtcttcctgggagggaccaaaggcggccaggatataactgacttcaccatgcaatttgtgtcttcctaaagagagctgtacccagagagtcctgtgctgaatgtggactcaatccctagggctggcagaaagggaacagaaaggtttttgagtacggctatagcctggactttcctgttgtctacaccaatgcccaactgcctgccttagggtagtgctaagaggatctcctgtccatcagccaggacagtcagctctctcctttcagggccaatccccagcccttttgttgagccaggcctctctcacctctcctactcacttaaagcccgcctgacagaaaccacggccacatttggttctaagaaaccctctgtcattcgctcccacattctgatgagcaaccgcttccctatttatttatttatttgtttgtttgttttattcattggtctaatttattcaaagggggcaagaagtagcagtgtctgtaaaagagcctagtttttaatagctatggaatcaattcaatttggactggtgtgctctctttaaatcaagtcctttaattaagactgaaaatatataagctcagattatttaaatgggaatatttataaatgagcaaatatcatactgttcaatggttctgaaataaacttcactgaag

SEQ ID NO: 196 - protein, 269 aa, Homo sapiens
MAEVPELASEMMAYYSGNEDDLFFEADGPKQMKCSFQDLDLCPLDGGIQLRISDHHYSKGFRQAASVVVAMDKLRKMLVPCPQTFQENDLSTFFPFIFEEEPIFFDTWDNEAYVHDAPVRSLNCTLRDSQQKSLVMSGPYELKALHLQGQDMEQQVVFSMSFVQGEESNDKIPVALGLKEKNLYLSCVLKDDKPTLQLESVDPKNYPKKKMEKRFVFNKIEINNKLEFESAQFPNWYISTSQAENMPVFLGGTKGGQDITDFTMQFVSS

SEQ ID NO: 197 - DNA, 980 bp, Homo sapiens
gcggcggcgggcagcagctgcgctgcgactgctctggaaggagaggacggggcacaaaccctgaccatgaccccccacaggctgctgccaccgctgctgctgctgctagctctgctgctcgctgccagcccaggaggcgccttggcgcggtgcccaggctgcgggcaaggggtgcaggcgggttgtccagggggctgcgtggaggaggaggatggggggtcgccagccgagggctgcgcggaagctgagggctgtctcaggagggaggggcaggagtgcggggtctacacccctaactgcgccccaggactgcagtgccatccgcccaaggacgacgaggcgcctttgcgggcgctgctgctcggccgaggccgctgccttccggcccgcgcgcctgctgttgcagaggagaatcctaaggagagtaaaccccaagcaggcactgcccgcccacaggatgtgaaccgcagagaccaacagaggaatccaggcacctctaccacgccctcccagcccaattctgcgggtgtccaagacactgagatgggcccatgccgtagacatctggactcagtgctgcagcaactccagactgaggtctaccgaggggctcaaacactctacgtgcccaattgtgaccatcgaggcttctaccggaagcggcagtgccgctcctcccaggggcagcgccgaggtccctgctggtgtgtggatcggatgggcaagtccctgccagggtctccagatggcaatggaagctcctcctgccccactgggagtagcggctaaagctgggggatagaggggctgcagggccactggaaggaacatggagctgtcatcactcaacaaaaaaccgaggccctcaatccaccttcaggccccgccccatgggcccctcaccgctggttggaaagagtgttggtgttggctggggtgtcaataaagctgtgcttggggtcgctgaaaaaaaaaaaaaa

SEQ ID NO: 198 - protein, 240 aa, Homo sapiens
MTPHRLLPPLLLLLALLLAASPGGALARCPGCGQGVQAGCPGGCVEEEDGGSPAEGCAEAEGCLRREGQECGVYTPNCAPGLQCHPPKDDEAPLRALLLGRGRCLPARAPAVAEENPKESKPQAGTARPQDVNRRDQQRNPGTSTTPSQPNSAGVQDTEMGPCRRHLDSVLQQLQTEVYRGAQTLYVPNCDHRGFYRKRQCRSSQGQRRGPCWCVDRMGKSLPGSPDGNGSSSCPTGSSG

SEQ ID NO: 199 - DNA, 1299 bp, Homo sapiens
atgaaattcaagctgcttgctgagtcctattgccggctgctgggagccaggagagccctgaggagtagtcactcagtagcagctgacgcgtgggtccaccatgaactggagtatctttgagggactcctgagtggggtcaacaagtactccacagcctttgggcgcatctggctgtctctggtcttcatcttccgcgtgctggtgtacctggtgacggccgagcgtgtgtggagtgatgaccacaaggacttcgactgcaatactcgccagcccggctgctccaacgtctgctttgatgagttcttccctgtgtcccatgtgcgcctctgggccctgcagcttatcctggtgacatgcccctcactgctcgtggtcatgcacgtggcctaccgggaggttcaggagaagaggcaccgagaagcccatggggagaacagtgggcgcctctacctgaaccccggcaagaagcggggtgggctctggtggacatatgtctgcagcctagtgttcaaggcgagcgtggacatcgcctttctctatgtgttccactcattctaccccaaatatatcctccctcctgtggtcaagtgccacgcagatccatgtcccaatatagtggactgcttcatctccaagccctcagagaagaacattttcaccctcttcatggtggccacagctgccatctgcatcctgctcaacctcgtggagctcatctacctggtgagcaagagatgccacgagtgcctggcagcaaggaaagctcaagccatgtgcacaggtcatcacccccacggtaccacctcttcctgcaaacaagacgacctcctttcgggtgacctcatctttctgggctcagacagtcatcctcctctcttaccagaccgcccccgagaccatgtgaagaaaaccatcttgtgaggggctgcctggactggtctggcaggttgggcctggatggggaggctctagcatctctcataggtgcaacctgagagtgggggagctaagccatgaggtaggggcaggcaagagagaggattcagacgctctgggagccagttcctagtcctcaactccagccacctgccccagctcgacggcactgggccagttccccctctgctctgcagctcggtttccttttctagaatggaaatagtgagggccaatgcccagggttggagggaggagggcgttcatagaagaacacacatgcgggcaccttcatcgtgtgtggcccactgtcagaacttaataaaagtcaactcatttgctggaaaaaaaaaaaaaaaaaa

SEQ ID NO: 200 - protein, 273 aa, Homo sapiens
MNWSIFEGLLSGVNKYSTAFGRIWLSLVFIFRVLVYLVTAERVWSDDHKDFDCNTRQPGCSNVCFDEFFPVSHVRLWALQLILVTCPSLLVVMHVAYREVQEKRHREAHGENSGRLYLNPGKKRGGLWWTYVCSLVFKASVDIAFLYVFHSFYPKYILPPVVKCHADPCPNIVDCFISKPSEKNIFTLFMVATAAICILLNLVELIYLVSKRCHECLAARKAQAMCTGHHPHGTTSSCKQDDLLSGDLIFLGSDSHPPLLPDRPRDHVKKTIL

SEQ ID NO: 201 - DNA, 1925 bp, Homo sapiens
actccaggtcccctatcctgtcctctgcaacccaaacgtccaggaggatcatgacctgcggatcaggatttggtgggcgcgccttcagctgcatctcggcctgcgggccgcgccccggccgctgctgcatcaccgccgccccctaccgtggcatctcctgctaccgcggcctcaccgggggcttcggcagccacagcgtgtgcggaggctttcgggccggctcctgcggacgcagcttcggctaccgctccgggggcgtgtgcgggcccagtcccccatgcatcaccaccgtgtcggtcaacgagagcctcctcacgcccctcaacctggagatcgaccccaacgcgcagtgcgtgaagcaggaggagaaggagcagatcaagtccctcaacagcaggttcgcggccttcatcgacaaggtgcgcttcctggagcagcagaacaaactgctggagacaaagctgcagttctaccagaaccgcgagtgttgccagagcaacctggagcccctgtttgagggctacatcgagactctgcggcgggaggccgagtgcgtggaggccgacagcgggaggctggcctcagagcttaaccacgtgcaggaggtgctggagggctacaagaagaagtatgaggaggaggtttctctgagagcaacagctgagaacgagtttgtggctctgaagaaggatgtggactgcgcctacctccgcaagtcagacctggaggccaacgtggaggccctgatccaggagatcgacttcctgaggcggctgtatgaggaggagatccgcattctccagtcgcacatctcagacacctccgtggttgtcaagctggacaacagccgggacctgaacatggactgcatcattgccgagattaaggcacagtatgacgacattgtcacccgcagccgggccgaggccgagtcctggtaccgcagcaagtgtgaggagatgaaggccacggtgatcaggcacggggagaccctgcgccgcaccaaggaggagatcaatgagctgaaccgcatgatccaaaggctgacggccgaggtggagaatgccaagtgccagaactccaagctggaggccgcggtggctcagtctgagcagcagggtgaggcagccctcagtgatgcccgctgcaagctggccgagctggagggcgccctgcagaaggccaagcaggacatggcctgcctgatcagggagtaccaggaggtgatgaactccaagctgggcctggacatcgagatcgccacctacaggcgcctgctggagggcgaggagcagaggctatgtgaaggcattggggctgtgaatgtctgtgtcagcagctcccggggcggggtcgtgtgcggggacctctgcgtgtcaggctcccggccagtgactggcagtgtctgcagcgctccgtgcaacgggaacgtggcggtgagcaccggcctgtgtgcgccctgcggccaattgaacaccacctgcggagggggttcctgcggcgtgggctcctgtggtatcagctccctgggtgtggggtcttgcggcagcagctgccggaaatgttaggcaccccaactcaagtcccaggccccaggcatctttgcctgccctgccttgcttggcccagtcagtcaggcgcctggagaagtgctcagctacttctcctgcactttgaaagacccctcccactcctggcctcacatttctctgtgtgatcccccacttctgggctctgccaccccacagtgggaaaggccaccctagaaagaagtccgctggcacccataggaaggggcctcaggagcaggaagggccaggaccagaaccttgcccacggcaactgccttcctgcctctccccttcctcctctgctcttgatctgtgtttcaataaattaatgtagccaaaaaaaaaaaaaaaaaa

SEQ ID NO: 202 - protein, 505 aa, Homo sapiens
MTCGSGFGGRAFSCISACGPRPGRCCITAAPYRGISCYRGLTGGFGSHSVCGGFRAGSCGRSFGYRSGGVCGPSPPCITTVSVNESLLTPLNLEIDPNAQCVKQEEKEQIKSLNSRFAAFIDKVRFLEQQNKLLETKLQFYQNRECCQSNLEPLFEGYIETLRREAECVEADSGRLASELNHVQEVLEGYKKKYEEEVSLRATAENEFVALKKDVDCAYLRKSDLEANVEALIQEIDFLRRLYEEEIRILQSHISDTSVVVKLDNSRDLNMDCIIAEIKAQYDDIVTRSRAEAESWYRSKCEEMKATVIRHGETLRRTKEEINELNRMIQRLTAEVENAKCQNSKLEAAVAQSEQQGEAALSDARCKLAELEGALQKAKQDMACLIREYQEVMNSKLGLDIEIATYRRLLEGEEQRLCEGIGAVNVCVSSSRGGVVCGDLCVSGSRPVTGSVCSAPCNGNVAVSTGLCAPCGQLNTTCGGGSCGVGSCGISSLGVGSCGSSCRKC

SEQ ID NO: 203 - DNA, 4996 bp, Homo sapiens
agtgctcgcccgcccgaccccggcggctcgcgcccgggagcgccgcagggtcgctagagtcggccgcgtcctttgtgtggcgctcaggctgcgccgcggggcggcgggacggaatgtgggcgctgcgggggcttttctctcctacccgaactgtgggaacaatggactgaaaggggaagatggattgaggggccgagcggggaagcgagctgcaccggggaatcatgacttctgcagccgagataaagaagccaccagtggcccccaagcccaagtttgttgtggcaaataataagccagccccacctcctattgcacctaaacccgacattgtgatttctagtgttccacagtcgacaaagaaaatgaaaccagcaatagccccaaaaccaaaagtcctgaagacctcacctgttcgagagattgggcagtcgccatcaaggaaaatcatgttgaacctggaagggcataaacaggaattagctgaaagcactgacaactttaattgtaaatatgaaggcaatcagagcaatgattatatttcaccaatgtgttcctgcagttctgagtgtatccataagctgggccatagagagaatttgtgtgtaaagcagcttgttttagagcccctggaaatgaatgaaaatttagaaaacagtaaaattgatgagactttgactataaaaactaggagtaaatgtgatttgtatggtgaaaaagccaagaaccagggtggggttgttttaaaggcaagcgttttagaagaggagctcaaagatgccttaatacaccaaatgccaccttttatttctgcacagaagcacaggcccacagacagcccagaaatgaatggtggctgtaattcaaatggacaattcagaattgaatttgcggatttgtcaccttccccatccagctttgaaaaagttcctgatcatcacagttgccacttacagcttcctagtgatgaatgtgaacattttgaaacttgccaggatgacagtgaaaaaagcaataattgctttcagtcatctgaactagaggctctggaaaatgggaaaaggagtactttaatatcttcagatggagttagtaagaaatcagaagtcaaagaccttggtcccttagaaattcatttagtaccatataccccaaaatttccaactcccaagcccagaaagacacgaactgctcgtctgttacgccaaaagtgtgtagatactcctagtgaaagcactgaagaaccggggaattcagacagtagctcttcctgtcttactgaaaatagtttgaaaatcaataaaatcagtgttctgcatcagaatgttttgtgtaagcaggaacaggtggataaaatgaagctaggaaataaaagtgaattgaatatggaatccaacagtgatgcacaggacttagtcaattcacagaaagccatgtgtaatgaaacaacttcctttgaaaaaatggcaccttcttttgataaagactctaatttgagttctgacagcacaactgtagatggttctagtatgtcgcttgctgtggacgaagggaccggttttataagatgtactgtatctatgagcctgcctaagcagctcaaattaacttgcaatgaacatttgcaatctgggagaaacctgggagtttctgcccctcaaatgcaaaaggaatctgttataaaagaggaaaattctctacgaattgtccccaaaaaacctcaaagacatagcttgcctgctacaggagtgcttaaaaaggctgcctccgaggagcttttggaaaaaagttcttatccttcaagtgaagaaaaaagttcagagaagagtctagaaagaaatcaccttcagcatttgtgtgcccaaaaccgtggtgtgtcatcctcctttgatatgcctaaacgggcttcagaaaagccagtgtggaagttacctcatcctattttacccttttcagggaacccagaattcttaaagtctgtcaccgtatcgtcaaacagtgagccttcaacagccctaaccaagcccagagcaaaatcgttatctgctatggatgtggaaaagtgcactaagccttgcaaagactctacaaagaaaaactcttttaaaaagttgctcagcatgaaactgtccatctgtttcatgaagagtgactttcaaaaattttggtccaagagtagccaactcggagacaccaccacaggccacctctccagtggggagcagaaggggattgaaagtgattggcaaggcttgttggtaggagaggagaagagaagtaaacccatcaaggcatattccacagaaaactatagcctggaatctcaaaagaagaggaagaagtctcggggccagaccagtgcagctaatggtctgagagctgagtctttggatgaccaaatgctctcccgggagtcatcatctcaggcaccttacaagtctgttacaagcctctgtgcaccggagtatgaaaatatacgccattatgaggaaataccagagtacgagaacttgccatttattatggctatacggaaaactcaagagttggaatggcagaattccagcagcatggaggacgctgatgcaaatgtgtatgaggtagaagagccatatgaagctccagatggccagctgcagcttggacccagacatcagcattccagttcaggagcatcccaggaggaacagaatgatcttggtcttggtgaccttccctctgatgaggaggaaatcatcaacagttctgatgaagatgatgtcagctctgagtcaagtaaaggagagcctgacccactggaagataaacaggatgaagataatggaatgaaaagtaaagttcatcatattgccaaggagatcatgagctcagagaaagtgtttgtggatgtgttaaaacttttgcatattgatttccgggatgcagtagctcatgcttccaggcaacttgggaaaccagtgattgaggaccggattctaaatcagatcctatactacttgcctcagctgtatgagctcaaccgggatctcttgaaggaactggaggaaagaatgttgcactggactgaacatcagagaattgctgatatctttgtaaagaagggaccatatctaaaaatgtattccacatacatcaaagaatttgataagaatatagccttgctggatgaacagtgcaagaaaaatccaggttttgctgctgttgttagagaatttgagatgagccctcgctgtgctaatctggccctcaagcactacctgctcaagccggttcagaggatcccccagtacaggctgttgctgacagattatttgaagaatctcatagaagatgctggagattacagagacactcaagatgcccttgctgttgttatagaggtagccaaccacgccaatgacaccatgaagcaaggagacaactttcagaaacttatgcaaattcagtacagcttaaatggacaccatgaaattgtgcagcctggtcgggtttttctcaaagaaggaattctgatgaagctgtctcggaaagtgatgcaacctcgaatgtttttcctgtttaatgatgccctgctgtatacaacaccagtgcagtctgggatgtataaactgaacaacatgctctcactggctggaatgaaggtcagaaaacctacccaagaagcctatcagaatgaattaaagattgaaagtgtagaacgttccttcattctctcagccagttctgccacagaaagggatgaatggctagaagcgatttccagggcaatagaagagtatgccaagaaaagaatcaccttctgtcctagtaggagtcttgatgaggcagactcagaaaataaagaagaagttagtcctcttggatcgaaggctcccatctggattcctgataccagagccacaatgtgtatgatctgcacaagcgaattcactctcacctggagacgacaccactgccgggcctgtggaaagattgtatgccaagcttgttcgtctaataagtatggcttagattacctgaaaaatcaaccagcaagagtatgtgaacattgtttccaagaactgcagaaattagatcaccagcactcccctaggattggatctcctggaaatcacaaatctccttcaagtgccttatcatcagtcttacatagcattccatcagggaggaaacagaaaaaaatcccagctgctctcaaagaagtatcagcaaacacagaggattcttctatgagtggctacttgtacagatcaaagggcaataaaaaaccctggaaacacttttggtttgtcataaaaaataaagtactatatacatatgctgcaagtgaggacgtggccgctttggagagtcagcctttattaggattcactgttattcaagttaaagatgagaattccgagtctaaagtatttcagttactgcacaaaaacatgttattttatgtattcaaagcagaggatgctcattcggctcagaagtggatagaagcatttcaggaaggcacaatattgtagcagtattggtttcatctcttctgtgattccaaagaggtggaatttcatcagaatggagtaaatgcaattcaaaaattgtataaaaatgaacactgccaagataaagccaaccagacccttcatcaaagaaattgttttgttaggtataagcaatttttaaaaggtgtttgttttttcatttatgttatttattaaaattttgatgtttacttaatggtcagaattatttctgagacacactgaattctaaagtaccatttctttagagaccagaaaaactatcttaatactgtatactgtattaactattcgtgacatagttcacactgttttcttaccttacattgtaacaatcttactggtggaaagtctttgtaaggaaaaaacacatagcaaggagcaaatttccacaaagtgcttggtttaggaattgtgattattataaaactgctgatgaaaaaaatgcatgtctttgaatc

SEQ ID NO: 204 - protein, 1430 aa, Homo sapiens
MTSAAEIKKPPVAPKPKFVVANNKPAPPPIAPKPDIVISSVPQSTKKMKPAIAPKPKVLKTSPVREIGQSPSRKIMLNLEGHKQELAESTDNFNCKYEGNQSNDYISPMCSCSSECIHKLGHRENLCVKQLVLEPLEMNENLENSKIDETLTIKTRSKCDLYGEKAKNQGGVVLKASVLEEELKDALIHQMPPFISAQKHRPTDSPEMNGGCNSNGQFRIEFADLSPSPSSFEKVPDHHSCHLQLPSDECEHFETCQDDSEKSNNCFQSSELEALENGKRSTLISSDGVSKKSEVKDLGPLEIHLVPYTPKFPTPKPRKTRTARLLRQKCVDTPSESTEEPGNSDSSSSCLTENSLKINKISVLHQNVLCKQEQVDKMKLGNKSELNMESNSDAQDLVNSQKAMCNETTSFEKMAPSFDKDSNLSSDSTTVDGSSMSLAVDEGTGFIRCTVSMSLPKQLKLTCNEHLQSGRNLGVSAPQMQKESVIKEENSLRIVPKKPQRHSLPATGVLKKAASEELLEKSSYPSSEEKSSEKSLERNHLQHLCAQNRGVSSSFDMPKRASEKPVWKLPHPILPFSGNPEFLKSVTVSSNSEPSTALTKPRAKSLSAMDVEKCTKPCKDSTKKNSFKKLLSMKLSICFMKSDFQKFWSKSSQLGDTTTGHLSSGEQKGIESDWQGLLVGEEKRSKPIKAYSTENYSLESQKKRKKSRGQTSAANGLRAESLDDQMLSRESSSQAPYKSVTSLCAPEYENIRHYEEIPEYENLPFIMAIRKTQELEWQNSSSMEDADANVYEVEEPYEAPDGQLQLGPRHQHSSSGASQEEQNDLGLGDLPSDEEEIINSSDEDDVSSESSKGEPDPLEDKQDEDNGMKSKVHHIAKEIMSSEKVFVDVLKLLHIDFRDAVAHASRQLGKPVIEDRILNQILYYLPQLYELNRDLLKELEERMLHWTEHQRIADIFVKKGPYLKMYSTYIKEFDKNIALLDEQCKKNPGFAAVVREFEMSPRCANLALKHYLLKPVQRIPQYRLLLTDYLKNLIEDAGDYRDTQDALAVVIEVANHANDTMKQGDNFQKLMQIQYSLNGHHEIVQPGRVFLKEGILMKLSRKVMQPRMFFLFNDALLYTTPVQSGMYKLNNMLSLAGMKVRKPTQEAYQNELKIESVERSFILSASSATERDEWLEAISRAIEEYAKKRITFCPSRSLDEADSENKEEVSPLGSKAPIWIPDTRATMCMICTSEFTLTWRRHHCRACGKIVCQACSSNKYGLDYLKNQPARVCEHCFQELQKLDHQHSPRIGSPGNHKSPSSALSSVLHSIPSGRKQKKIPAALKEVSANTEDSSMSGYLYRSKGNKKPWKHFWFVIKNKVLYTYAASEDVAALESQPLLGFTVIQVKDENSESKVFQLLHKNMLFYVFKAEDAHSAQKWIEAFQEGTIL

SEQ ID NO: 205 - DNA, 1930 bp, Homo sapiens
gaccaagtggctcctgcgatggcggcggaagaggaggctgcggcgggaggtaaagtgttgagagaggagaaccagtgcattgctcctgtggtttccagccgcgtgagtccagggacaagaccaacagctatggggtctttcagctcacacatgacagagtttccacgaaaacgcaaaggaagtgattcagacccatcccagtcaggaatcatgacagaaaaagtggtggaaaagctttctcagaatccccttacctatcttctttcaacaaggatagaaatatcagcctccagtggcagcagagtggaagatggtgaacaccaagttaaaatgaaggccttcagagaagctcatagccaaactgaaaagcggaggagagataaaatgaataacctgattgaagaactgtctgcaatgatccctcagtgcaaccccatggcgcgtaaactggacaaacttacagttttaagaatggctgttcaacacttgagatctttaaaaggcttgacaaattcttatgtgggaagtaattatagaccatcatttcttcaggataatgagctcagacatttaatccttaagactgcagaaggcttcttatttgtggttggatgtgaaagaggaaaaattctcttcgtttctaagtcagtctccaaaatacttaattatgatcaggctagtttgactggacaaagcttatttgacttcttacatccaaaagatgttgccaaagtaaaggaacaactttcttcttttgatatttcaccaagagaaaagctaatagatgccaaaactggtttgcaagttcacagtaatctccacgctggaaggacacgtgtgtattctggctcaagacgatcttttttctgtcggataaagagttgtaaaatctctgtcaaagaagagcatggatgcttacccaactcaaagaagaaagagcacagaaaattctatactatccattgcactggttacttgagaagctggcctccaaatattgttggaatggaagaagaaaggaacagtaagaaagacaacagtaattttacctgccttgtggccattggaagattacagccatatattgttccacagaacagtggagagattaatgtgaaaccaactgaatttataacccggtttgcagtgaatggaaaatttgtctatgtagatcaaagggcaacagcgattttaggatatctgcctcaggaacttttgggaacttcttgttatgaatattttcatcaagatgaccacaataatttgactgacaagcacaaagcagttctacagagtaaggagaaaatacttacagattcctacaaattcagagcaaaagatggctcttttgtaactttaaaaagccaatggtttagtttcacaaatccttggacaaaagaactggaatatattgtatctgtcaacactttagttttgggacatagtgagcctggagaagcatcatttttaccttgtagctctcaatcatcagaagaatcctctagacagtcctgtatgagtgtacctggaatgtctactggaacagtacttggtgctggtagtattggaacagatattgcaaatgaaattctggatttacagaggttacagtcttcttcataccttgatgattcgagtccaacaggtttaatgaaagatactcatactgtaaactgcaggagtatgtcaaataaggagttgtttccaccaagtccttctgaaatgggggagctagaggctaccaggcaaaaccagagtactgttgctgtccacagccatgagccactcctcagtgatggtgcacagttggatttcgatgccctatgtgacaatgatgacacagccatggctgcatttatgaattacttagaagcagaggggggcctgggagaccctggggacttcagtgacatccagtggaccctctagc

SEQ ID NO: 206 - protein, 636 aa, Homo sapiens
MAAEEEAAAGGKVLREENQCIAPVVSSRVSPGTRPTAMGSFSSHMTEFPRKRKGSDSDPSQSGIMTEKVVEKLSQNPLTYLLSTRIEISASSGSRVEDGEHQVKMKAFREAHSQTEKRRRDKMNNLIEELSAMIPQCNPMARKLDKLTVLRMAVQHLRSLKGLTNSYVGSNYRPSFLQDNELRHLILKTAEGFLFVVGCERGKILFVSKSVSKILNYDQASLTGQSLFDFLHPKDVAKVKEQLSSFDISPREKLIDAKTGLQVHSNLHAGRTRVYSGSRRSFFCRIKSCKISVKEEHGCLPNSKKKEHRKFYTIHCTGYLRSWPPNIVGMEEERNSKKDNSNFTCLVAIGRLQPYIVPQNSGEINVKPTEFITRFAVNGKFVYVDQRATAILGYLPQELLGTSCYEYFHQDDHNNLTDKHKAVLQSKEKILTDSYKFRAKDGSFVTLKSQWFSFTNPWTKELEYIVSVNTLVLGHSEPGEASFLPCSSQSSEESSRQSCMSVPGMSTGTVLGAGSIGTDIANEILDLQRLQSSSYLDDSSPTGLMKDTHTVNCRSMSNKELFPPSPSEMGELEATRQNQSTVAVHSHEPLLSDGAQLDFDALCDNDDTAMAAFMNYLEAEGGLGDPGDFSDIQWTL

SEQ ID NO: 207 - DNA, 2123 bp, Homo sapiens
caagagttggtaagctcgctgcagtgggtggagagaggcctctagacttcagtttcagtttcctggctctgggcagcagcaagaattcctctgcctcccatcctaccattcactgtcttgccggcagccagctgagagcaatgggaaatggggagtcccagctgtcctcggtgcctgctcagaagctgggttggtttatccaggaatacctgaagccctacgaagaatgtcagacactgatcgacgagatggtgaacaccatctgtgacgtcctgcaggaacccgaacagttccccctggtgcagggagtggccataggtggctcctatggacggaaaacagtcttaagaggcaactccgatggtacccttgtcctcttcttcagtgacttaaaacaattccaggatcagaagagaagccaacgtgacatcctcgataaaactggggataagctgaagttctgtctgttcacgaagtggttgaaaaacaatttcgagatccagaagtcccttgatgggttcaccatccaggtgttcacaaaaaatcagagaatctctttcgaggtgctggccgccttcaacgctctgagtaagcattgctgggtgtcaggagagaaaagccaaagaagcgggtgccagacagctctgtgcaacctctaggccatgagtgggatagataccactgctgctttaaaaaatgggagaccatagaccctcaggagagaagaatcccttctaccctggactcgctctcttctctggaactaacttctcccccataccctgattgtctttggagaaaatgttctggattctagaatctaaggcagagccttttaagccatactgtacacataaatcacctggaaccttgttaaaatgcagatcctgactcaggaggtctgagttagagcccaggatttcatatttctagccagctccatgatgagctgctggtccgcagatcatgcttgcaggttttgaccagagtcagtgttggttagagtaagaggatgaggcagacatctgggaaaagtccagctggggcaagcatttgaagtctgccttcctaccaggtcaaaatcaaggcaacgaccttccatagataactatcaaagcttgagggggtgccttgaacccaactcctaaatccctaagacctgcccacctcttgtgtctcctgtctcagcaaacattcccacactcttgcatattgttaaagtaacctctgcttaccaggcttctggtttaataaaagatggctagagtgactccatcttaaagcaagtagctaggcactcaaaaggaacctacaggcttaatacttgggtctgaaaatagccacagtctaagctgaccaccaattataattgcagaatatttaaggccatacaaaacatctcccactaagcctacaaaatgtccaggtgtcctaaaagttcagcccacttaaaggcagcattaatgagcaggtttaggttgaaggattaatggtcatcaataccactgttaagaagaaaattcttggccaaattgaatttaatggagtttaactgagcagacaattcacaaatctagaagcctcctgagccagagtaggttcagagagtcttgaacacagccacgtggtggaagaagatttatggacaggaaaaggaaaatgatgtactgaaaatgaaagtgaggtacagaaacagccagactggttatagctcagcattggccttatttgaacgagatttgaacagttggccacctttgattggccgaaactcagtgattggcacaagagtaggttgcagtctgtttacacatccttttaggttatagttcaccatgtacagagaaattttaggccaaacttaaaatatgtaaggaggcagctttaggctaaacttgatttaacagcaccaataccccctacctttagtgagcacatctgcacattccaattttaatgacagctccttagaatttcttatcaacgaagacactaacaaagaatggcgcattcctccttctcctttctgaggatgccctaccctgtaacaaagtcgtttctaataaatttgcttctttcaccataaaaaaaaaaaaaaaaaaaaaaaaaaaaaaaaaaaaaaa

SEQ ID NO: 208 - protein, 172 aa, Homo sapiens
MGNGESQLSSVPAQKLGWFIQEYLKPYEECQTLIDEMVNTICDVLQEPEQFPLVQGVAIGGSYGRKTVLRGNSDGTLVLFFSDLKQFQDQKRSQRDILDKTGDKLKFCLFTKWLKNNFEIQKSLDGFTIQVFTKNQRISFEVLAAFNALSKHCWVSGEKSQRSGCQTALCNL

SEQ ID NO: 209 - DNA, 1763 bp, Homo sapiens
tagctggattccagccattgctgcagctgctccacagcccttttcaggacccaaacaaccgcagccgctgttcccaggatggtgatccgtgtatatattgcatcttcctctggctctacagcgattaagaagaaacaacaagatgtgcttggtttcctagaagccaacaaaataggatttgaagaaaaagatattgcagccaatgaagagaatcggaagtggatgagagaaaatgtacctgaaaatagtcgaccagccacaggttaccccctgccacctcagattttcaatgaaagccagtatcgcggggactatgatgccttctttgaagccagagaaaataatgcagtgtatgccttcttaggcttgacagccccacctggttcaaaggaagcagaagtgcaagcaaagcagcaagcatgaaccttaagcactgtgctttaagcatcctgaaaaatgagtctccattgcttttataaaatagcagaattagctttgcttcaaaagaaataggcttaatgttgaaataatagattagttgggttttcacatgcaaacattcaaaatgaatacaaaattaaaatttgaacattatggtgattatggtgaggagaatgggatattaacataaaattatattaataagtagatatcgtagaaatagtgttgttacctgccaagccatcctgtatacaccaatgattttacaaagaaaacacccttccctccttctgccattactatggcaacttaagtgtatctgcagctctacattaaaaaggagaaagagaaataacctgtctctcattcctaagttgcctcattaattttcatgaacaagaatatgtacctttttgatgctatattactgcgattaaaaaagttcttgcaggtaatgtttatgtatagttaaacgttgtaatttcttatcgtaattataacattcccattctttgtagatgaaactctacatatgaaccacagattttctgagcttctaaatgtagcctttcattgcacatttcagtgatcagaatagatatccttttacacgcacaaaagcaatagattcattcagtggacaagttccttgtttaactacacagctatgatggaatcatatatccaagttccttgcctcagtgaaatatgcatatgtatatcatgaagtgggatgccaagtaagcttaaaatgcattctctagcaaagagattagacttttaaataactcttataaaacaggttggcgatcatttcccaagattggtttcccttgagtttttgttaaaacaaatcttagtagttttgcccgtttaaaacaactcacaatcgtaaatgctactattcctaagatatcttacctttttatttcagtttagccatgtattgtatgagtgtattagtctaagcagtgagaatcttttctatgcctctattccagcaaaaagtagaagtatcaaataaaaagggcaacttttaaaatattaagcctgaagacttctaaaaagacaagaaacatggcctaaataaccaacatagatttacatagtaagtttcacactaccttattaccaaaagcaaacacctcttactttaaactacattatcatgtatatctattgtatgctggtctttactttttgccaaaatcaacatataatgaagagatgcctttgtttgatgagattcaaacttgatgctatgctttaaaataaactcagtacttttagaaacataaaaaaaaaaaaaaaaaaaaaaaaaa

SEQ ID NO: 210 - protein, 114 aa, Homo sapiens
MVIRVYIASSSGSTAIKKKQQDVLGFLEANKIGFEEKDIAANEENRKWMRENVPENSRPATGYPLPPQIFNESQYRGDYDAFFEARENNAVYAFLGLTAPPGSKEAEVQAKQQA

SEQ ID NO: 211 - DNA, 2312 bp, Homo sapiens
gggcccggcgcgcggtagcgcgggcccctcagtgcacaatggctagagcaggcggcggagccccaaccccacccagtgcggagcgcgccgcgagccccgccgcaagctgagcgcctccgcccgccaggcgcgccggcgccgggccatgtactcggggaaccgcagcggcggccacggctactgggacggcggcggggccgcgggcgctgaggggccggcgccggcggggacactgagccccgcgcccctcttcagccccggcacctacgagcgcctggcgctgctgctgggctccattgggctgctgggcgtcggcaacaacctgctggtgctcgtcctctactacaagttccagcggctccgcactcccactcacctcctcctggtcaacatcagcctcagcgacctgctggtgtccctcttcggggtcacctttaccttcgtgtcctgcctgaggaacggctgggtgtgggacaccgtgggctgcgtgtgggacgggtttagcggcagcctcttcgcttcgttgtgtggaagatcttcagacaattcaagtgatcaagattttaaaatatgaaaagaaactggccaaaatgtgctttttaatgatattcaccttcctggtctgttggatgccttatatcgtgatctgcttcttggtggttaatggtcatggtcacctggtcactccaacaatatctattgtttcgtacctctttgctaaatcgaacactgtatacaatccagtgatttatgtcttcatgatcagaaagtttcgaagatcccttttgcagcttctgtgcctccgactgctgaggtgccagaggcctgctaaagacctaccagcagctggaagtgaaatgcagatcagacccattgtgatgtcacagaaagatggggacaggccaaagaaaaaagtgactttcaactcttcttccatcatttttatcatcaccagtgatgaatcactgtcagttgacgacagcgacaaaaccaatgggtccaaagttgatgtaatccaagttcgtcctttgtaggaatgaagaatggcaacgaaagatggggccttaaattggatgccacttttggactttcatcataagaagtgtctggaatacccgttctatgtaatatcaacagaaccttgtggtccagcaggaaatccgaattgcccatatgctcttgggcctcaggaagaggttgaacaaaaacaaattcttttaattcaacgggtgctttacataatgaaaaaaccacttgtggcacacgatgggcatctaacatcatcatcttctaatgtgttggagattttcatttcaaatatattttttaaattactctattttccaaaacacgtaatgcatttttctcgaaaataccttactgtaaaaataactgtcgcgtacacatgtgtgaagtagctagaacatactgaattttttttgtactgttggactctattcagtgtcatgtcctatatctgatcaagttatcaaggagataattctagaatgaaaaagaaaatcctcttgttggaaacaaaagacgttttatatgtgcagtatgacaaagaggagtttcagagacaactttgaatccttgtcagcctggagaccagcaccagaggaatctacaaggcaaactcccatatatttgcttcccccaaattgctgcccctacagactcaaagctctttttctttgttttgttgtttctctaaaaatttactgttctttgtcgatgctatataagccagggagttctaagacgccagctctttgagatttgctcattcccctgtatttcccacatatatattacatatacccgctaataaatttatgtttgtttttctcttgtcaatctgtcttttgttataggggccccagccaaggaacctaaagtgggtagaaggaaaaattattttttctttccctacaaactgaacatggattattagaactcaaggttttcattgacaatatagaaaagaaacactgaatcattttattttattgcccaatttttatttcttatatgactctagtgtttcatcttcataattaatcatgtttgaaggatttctgagtgactcagcagcctgttaaagaaggatgaaccaaagaaaacatttcactaaatgtgcttttaaaaatcaagtgtattgctggttctgctgcagtatgtagtcgaagaataaattagtaaattgcttctgagggtctgaaattgaataaagtaatggctttgtatttctataaaagttgtctccccttgtttcctttccattctggcacatgtagacatttaattta

SEQ ID NO: 212 - protein, 142 aa, Homo sapiens
MYSGNRSGGHGYWDGGGAAGAEGPAPAGTLSPAPLFSPGTYERLALLLGSIGLLGVGNNLLVLVLYYKFQRLRTPTHLLLVNISLSDLLVSLFGVTFTFVSCLRNGWVWDTVGCVWDGFSGSLFASLCGRSSDNSSDQDFKI

SEQ ID NO: 213 - DNA, 702 bp, Homo sapiens
aggaagccgactaggcgaattcacttactgaccggcctgggctgctctgagacatggaggaagccagtgaaggtggaggaaatgatcgtgtgcggaacctgcaaagtgaggtggagggagttaagaatattatgacccagaatgtggagcggatcctggcccggggggaaaacttggaacatctccgcaacaagacagaggatctggaagccacatctgagcacttcaagacgacatcgcagaaggtggctcggaaattctggtggaagaacgtgaagatgattgtccttatctgcgtgattgtttttatcatcatcctcttcattgtgctctttgccactggtgccttctcttaagtaacagggaacctctcccacctgcccttcttttcagggacaaccctccataaatgtgtgccaagagggtctcctttcctgtcttcctctacagagaatgctgctcggtcctcctacccctcttcccgaggccctgctgccacgttgtatgccccagaaggtaccttggtcccccggaaggagagaaaaaagagagatggactgtggctgcatttcttgggtccttagagtgggctggagagacctagagggcccagcatgtggctgggaaactgttggtggccagtgggtaataaagacctttcagtatccctaaaaaaaaaaaaaaaaaaaaaaaaaaaaaaaa

SEQ ID NO: 214 - protein, 100 aa, Homo sapiens
MEEASEGGGNDRVRNLQSEVEGVKNIMTQNVERILARGENLEHLRNKTEDLEATSEHFKTTSQKVARKFWWKNVKMIVLICVIVFIIILFIVLFATGAFS

SEQ ID NO: 215 - DNA, 1399 bp, Homo sapiens
agtgtgaaatcttcagagaagaatttctctttagttctttgcaagaaggtagagataaagacactttttcaaaaatggcaatggtatcagaattcctcaagcaggcctggtttattgaaaatgaagagcaggaatatgttcaaactgtgaagtcatccaaaggtggtcccggatcagcggtgagcccctatcctaccttcaatccatcctcggatgtcgctgccttgcataaggccataatggttaaaggtgtggatgaagcaaccatcattgacattctaactaagcgaaacaatgcacagcgtcaacagatcaaagcagcatatctccaggaaacaggaaagcccctggatgaaacacttaagaaagcccttacaggtcaccttgaggaggttgttttagctctgctaaaaactccagcgcaatttgatgctgatgaacttcgtgctgccatgaagggccttggaactgatgaagatactctaattgagattttggcatcaagaactaacaaagaaatcagagacattaacagggtctacagagaggaactgaagagagatctggccaaagacataacctcagacacatctggagattttcggaacgctttgctttctcttgctaagggtgaccgatctgaggactttggtgtgaatgaagacttggctgattcagatgccagggccttgtatgaagcaggagaaaggagaaaggggacagacgtaaacgtgttcaataccatccttaccaccagaagctatccacaacttcgcagagtgtttcagaaatacaccaagtacagtaagcatgacatgaacaaagttctggacctggagttgaaaggtgacattgagaaatgcctcacagctatcgtgaagtgcgccacaagcaaaccagctttctttgcagagaagcttcatcaagccatgaaaggtgttggaactcgccataaggcattgatcaggattatggtttcccgttctgaaattgacatgaatgatatcaaagcattctatcagaagatgtatggtatctccctttgccaagccatcctggatgaaaccaaaggagattatgagaaaatcctggtggctctttgtggaggaaactaaacattcccttgatggtctcaagctatgatcagaagactttaattatatattttcatcctataagcttaaataggaaagtttcttcaacaggattacagtgtagctacctacatgctgaaaaatatagcctttaaatcatttttatattataactctgtataatagagataagtccattttttaaaaatgttttccccaaaccataaaaccctatacaagttgttctagtaacaatacatgagaaagatgtctatgtagctgaaaataaaatgacgtcacaagac

SEQ ID NO: 216 - protein, 346 aa, Homo sapiens
MAMVSEFLKQAWFIENEEQEYVQTVKSSKGGPGSAVSPYPTFNPSSDVAALHKAIMVKGVDEATIIDILTKRNNAQRQQIKAAYLQETGKPLDETLKKALTGHLEEVVLALLKTPAQFDADELRAAMKGLGTDEDTLIEILASRTNKEIRDINRVYREELKRDLAKDITSDTSGDFRNALLSLAKGDRSEDFGVNEDLADSDARALYEAGERRKGTDVNVFNTILTTRSYPQLRRVFQKYTKYSKHDMNKVLDLELKGDIEKCLTAIVKCATSKPAFFAEKLHQAMKGVGTRHKALIRIMVSRSEIDMNDIKAFYQKMYGISLCQAILDETKGDYEKILVALCGGN

SEQ ID NO: 217 - DNA, 2521 bp, Homo sapiens
aggagcttagagtggagtttacaggaatgaatcactgattagcggcaggcctaagtgtgggcactgtcgcaccacacacccagatactactccaggcacgggcattaggggctcccacaggctggacaggccttggactttcctggttgaaccgtgaggccgcggtgtcagtccacactccactgtgggtggcgggttcggccccgcgaggaggcgccgctctcaaaccccacggtcccgcgcagcgaagaggcgaggcggccgcggaaggcaggcgcagcccactcttcccgagaggccccgacatctcccggataatctggagctttcaaaatgtttgccaaagcaaccaggaattttcttagagaagttgatgctgatggtgacctgattgcagtatcaaatctgaatgactctgataagttacagcttctaagtctggtgacaaaaaagaagagattctggtgctggcagagacccaagtaccagtttttatccctcacccttggcgatgtactcatagaagaccaatttccgagtccagtggtcgtggagtcggactttgtgaaatacgagggcaagtttgcaaaccacgtgagtggaaccctggagactgcactggggaaggtcaagctgaacctggggggcagcagccgcgtagagagccagtcttcatttggaaccctgaggaagcaggaggtggatttgcagcagctcatcagagactctgccgagagaacaataaatctgagaaaccctgtgctccagcaggtgctggaaggaaggaatgaggtcctgtgcgttttgacacagaagatcacgacgatgcagaagtgtgtgatctctgagcacatgcaggtcgaggagaagtgtggtggcatcgtgggcatccagaccaagacggtgcaggtgtcagcgacggaggatgggaatgtcaccaaggactccaacgtggtgctggagatcccagctgccaccaccattgcctacggtgtcattgagttatacgtgaaactggacggccagttcgagttctgccttctccgagggaagcaaggtggcttcgagaacaagaagagaattgactctgtctacctggaccccctggtctttcgagagtttgcattcatagacatgccagatgctgcgcatgggatatcttcccaggatggaccattaagtgttttaaagcaagcgaccctgctcctggagaggaatttccatccatttgcggagctgcctgagccacaacagacagctttgagtgacatcttccaggcggtcctatttgatgatgaactactcatggtcctggaaccagtgtgcgatgacctggtcagcggcctctcgcccacagtggcggtgctgggggagctgaagccccggcagcagcaggaccttgtggccttcctgcagctggtggggtgcagcttacagggtgggtgtccgggccccgaggatgcaggcagcaagcagctgtttatgacagcctacttcttggtcagtgccctcgcagaaatgccagatagcgcagcagctctgctgggcacttgctgcaaactccagatcattcccacactgtgccacttgcttcgtgctctgtctgatgatggagtatctgatcttgaagacccaaccttgactcccctgaaagatacagaaaggtttgggattgtgcagcgcttgtttgcctcagctgacattagtctggagagactgaagtcatctgtgaaagctgtcattctgaaggactctaaagtcttcccactgcttctttgtataaccctgaatggactctgtgctttaggcagagaacattcatgatgtcatatgtgaactagaagtacgtgttactggccaaggctatttttcagaactgttaaaggtcatatgcacgttaaaagttgaccaatgaaatgaatttacagaacagtttaagaagtggtgacattttgcatgatgaatgacctgacttttagccaccaggtactctttaaacagttttccttatcagaggccctcctgtgctggtgacccagcatctgagttaggttccagcatgtaaagagctgggagggcggagaattcttagcatacattcagacgttttttctgcacaataataagtccatctgtcacttgcattccactttttgttacatagaaagagtctgaccctttaatccaaaaggtctttttacattgtgaatgctgtgggaaggcaatttctctgcacacaagaggctacgttttggaagtgatgtatgttatttgatgactgaaaatgaactgtaaatgctcctagagtatattcctctgctgaacaaaattaaacttcaaaaaaatctaacagtaacacacccctgcttgggaccctagctatatgcattttatgtgaccttgccatgcttcagtgaacatactaattctatgtctagcacatgttgatttcctatgtattctgggtattctattaaaggaaactttgaactatgaaaaaaaaaaaaaaaaaaaaaaaaaa

SEQ ID NO: 218 - protein, 496 aa, Homo sapiens
MFAKATRNFLREVDADGDLIAVSNLNDSDKLQLLSLVTKKKRFWCWQRPKYQFLSLTLGDVLIEDQFPSPVVVESDFVKYEGKFANHVSGTLETALGKVKLNLGGSSRVESQSSFGTLRKQEVDLQQLIRDSAERTINLRNPVLQQVLEGRNEVLCVLTQKITTMQKCVISEHMQVEEKCGGIVGIQTKTVQVSATEDGNVTKDSNVVLEIPAATTIAYGVIELYVKLDGQFEFCLLRGKQGGFENKKRIDSVYLDPLVFREFAFIDMPDAAHGISSQDGPLSVLKQATLLLERNFHPFAELPEPQQTALSDIFQAVLFDDELLMVLEPVCDDLVSGLSPTVAVLGELKPRQQQDLVAFLQLVGCSLQGGCPGPEDAGSKQLFMTAYFLVSALAEMPDSAAALLGTCCKLQIIPTLCHLLRALSDDGVSDLEDPTLTPLKDTERFGIVQRLFASADISLERLKSSVKAVILKDSKVFPLLLCITLNGLCALGREHS

SEQ ID NO: 219 - DNA, 598 bp, Homo sapiens
cagagtcactcctgccttcaccatgaagtccagcggcctcttccccttcctggtgctgcttgccctgggaactctggcaccttgggctgtggaaggctctggaaagtccttcaaagctggagtctgtcctcctaagaaatctgcccagtgccttagatacaagaaacctgagtgccagagtgactggcagtgtccagggaagaagagatgttgtcctgacacttgtggcatcaaatgcctggatcctgttgacaccccaaacccaacaaggaggaagcctgggaagtgcccagtgacttatggccaatgtttgatgcttaacccccccaatttctgtgagatggatggccagtgcaagcgtgacttgaagtgttgcatgggcatgtgtgggaaatcctgcgtttcccctgtgaaagcttgattcctgccatatggaggaggctctggagtcctgctctgtgtggtccaggtcctttccaccctgagacttggctccaccactgatatcctcctttggggaaaggcttggcacacagcaggctttcaagaagtgccagttgatcaatgaataaataaacgagcctatttctctttgcac

SEQ ID NO: 220 - protein, 132 aa, Homo sapiens
MKSSGLFPFLVLLALGTLAPWAVEGSGKSFKAGVCPPKKSAQCLRYKKPECQSDWQCPGKKRCCPDTCGIKCLDPVDTPNPTRRKPGKCPVTYGQCLMLNPPNFCEMDGQCKRDLKCCMGMCGKSCVSPVKA

SEQ ID NO: 221 - DNA, 1607 bp, Homo sapiens
aatgactcctttcggtaagtgcagtggaagctgtacactgcccaggcaaagcgtccgggcagcgtaggcgggcgactcagatcccagccagtggacttagcccctgtttgctcctccgataactggggtgaccttggttaatattcaccagcagcctcccccgttgcccctctggatccactgcttaaatacggacgaggacagggccctgtctcctcagcttcaggcaccaccactgacctgggacagtgaatcgacaatgccgtcttctgtctcgtggggcatcctcctgctggcaggcctgtgctgcctggtccctgtctccctggctgaggatccccagggagatgctgcccagaagacagatacatcccaccatgatcaggatcacccaaccttcaacaagatcacccccaacctggctgagttcgccttcagcctataccgccagctggcacaccagtccaacagcaccaatatcttcttctccccagtgagcatcgctacagcctttgcaatgctctccctggggaccaaggctgacactcacgatgaaatcctggagggcctgaatttcaacctcacggagattccggaggctcagatccatgaaggcttccaggaactcctccgtaccctcaaccagccagacagccagctccagctgaccaccggcaatggcctgttcctcagcgagggcctgaagctagtggataagtttttggaggatgttaaaaagttgtaccactcagaagccttcactgtcaacttcggggacaccgaagaggccaagaaacagatcaacgattacgtggagaagggtactcaagggaaaattgtggatttggtcaaggagcttgacagagacacagtttttgctctggtgaattacatcttctttaaaggcaaatgggagagaccctttgaagtcaaggacaccgaggaagaggacttccacgtggaccaggtgaccaccgtgaaggtgcctatgatgaagcgtttaggcatgtttaacatccagcactgtaagaagctgtccagctgggtgctgctgatgaaatacctgggcaatgccaccgccatcttcttcctgcctgatgaggggaaactacagcacctggaaaatgaactcacccacgatatcatcaccaagttcctggaaaatgaagacagaaggtctgccagcttacatttacccaaactgtccattactggaacctatgatctgaagagcgtcctgggtcaactgggcatcactaaggtcttcagcaatggggctgacctctccggggtcacagaggaggcacccctgaagctctccaaggccgtgcataaggctgtgctgaccatcgacgagaaagggactgaagctgctggggccatgtttttagaggccatacccatgtctatcccccccgaggtcaagttcaacaaaccctttgtcttcttaatgattgaacaaaataccaagtctcccctcttcatgggaaaagtggtgaatcccacccaaaaataactgcctctcgctcctcaacccctcccctccatccctggccccctccctggatgacattaaagaagggttgagctggtccctgcctgcaaaa

SEQ ID NO: 222 - protein, 418 aa, Homo sapiens
MPSSVSWGILLLAGLCCLVPVSLAEDPQGDAAQKTDTSHHDQDHPTFNKITPNLAEFAFSLYRQLAHQSNSTNIFFSPVSIATAFAMLSLGTKADTHDEILEGLNFNLTEIPEAQIHEGFQELLRTLNQPDSQLQLTTGNGLFLSEGLKLVDKFLEDVKKLYHSEAFTVNFGDTEEAKKQINDYVEKGTQGKIVDLVKELDRDTVFALVNYIFFKGKWERPFEVKDTEEEDFHVDQVTTVKVPMMKRLGMFNIQHCKKLSSWVLLMKYLGNATAIFFLPDEGKLQHLENELTHDIITKFLENEDRRSASLHLPKLSITGTYDLKSVLGQLGITKVFSNGADLSGVTEEAPLKLSKAVHKAVLTIDEKGTEAAGAMFLEAIPMSIPPEVKFNKPFVFLMIEQNTKSPLFMGKVVNPTQK

SEQ ID NO: 223 - DNA, 3614 bp, Homo sapiens
gctacaagatgaccactgaggattacaagaagctgtgagtatgcaacgccaggcaccctacaatatcaggcgcagctctacatcaggggacaccgaggaggaggaggaggaggaggtggtgccattctcctcagatgaacagaaacggaggtcagaggctgcaagcggtgttctgaggaggacagctccccgggagcactcctacgtcctgtcagcggccaagaagagcactggcagtcctacccaggagacacaggcaccgtttatcgcgaagagggtggaggtggtggaagaggacgggccttctgagaagagccaggacccacctgctctggcaagatccactcctggctcaaacagctcaagaggtgaggaaattgtccgcctgcagatcctgacacccagggcaggactccgcctggtggccccagacgtggaaggcatgagctccagtgccacttcagtctctgctgtccctgctgataggaagagcaacagcacagcagcccaggaggatgcaaaggcagacccaaagggggccttggctgattgtgaggggaaggatgtacccaccagggtcggagaggcctggcaggagaggcctggagctccaagaggtggccaaggagacccagctgtacccgctcagcaacctgcagatcccagcaccccagagcggcagagcagccccagcggatctgagcaacttgtcagacgagagagttgtggcagtagcgtgttgactgattttgaggggaaggatgtggccaccaaggtcggagaggcctggcaggacaggcctagagccccaagaggtggccaaggagacccagctgtacccactcagcaacctgcagatcccagtaccccagaacagcagaacagccccagcggatctgagcaattcgtcagacgagagagctgcaccagcagggtgaggagcccctcgagctgcatggtcactgttactgtcactgccacatctgagcagcctcacatttatattccagcccccgcaagtgaattggactccagctctaccaccaaagggattctcttcgtgaaggagtacgtgaatgctagtgaagtgtcttctgggaagccagtatctgcacgctatagcaacgtcagcagcattgaggactcattcgccatggagaagaagcctccatgtggcagcactccatactctgagaggacaactggagggatctgtacttactgcaaccgtgagatccgagactgtccaaagattaccctagaacatcttggtatctgctgccatgaatattgctttaagtgtgggatttgcagtaaaccgatgggcgatctcctggatcagatcttcattcaccgtgacaccattcactgtgggaaatgctatgagaagctcttctagcgaccccccaccgccaggctgatcagaagctgatgactcgtggacaaatttggctgtccccagttttgccccaagttgctgtctccccttccctcacctcctccctccctgtttgatttcttcatgcttttgcccttctcaagttgaagttgcatacatccaatatcgtatcttaatgatgctatgataattgcttgtgtgtgtagcttcttgtagcttagaaagcgctttatgcccatgatgtcatttcaggctcaaccaaagaggatcaaacaggaattccatcttggcttccctaagacagattggctttctaatgagtttaagtgggcagaagtgtagggttcagtgtgtcctgactcccttgaggcttataatgggccaagttgaagactgttgatgatccctggtgggtaaattgcagacatcaaatgctagggattggcataggctagtgtttagcttgtctatttgccatatctatttttttaaatttccatacacttgtaaaagtagttagttgcttttgattgagttatatagcagtttttcatttggtcttccactcaccgttcactatatttgagtgttcccttacaggtatgttggcatgtgttggaaaatttacacaattaggtttaaattcagtaggatgtgattttgggggtggactgatcaaagtgatatctgtgtctgttggaatcttgatagctgattaatttgccctcaattctgctccctgaacttcacacataaatcttcccaagtgggttttagggtgtatagatcccagcaggattaaggaagtggaaaagcagctaacatttcttgaggctctaccacatagcaggcactgtcacagagtaatggcattaatccccataataatcctgtgaaggtgatattctcatcccatcttagacatgaggatattggaactcagagaggtggctattgcattgcgcagaacgctacagagcccatgctcttcccagagcagcacccacaaaagcaagcattgattttgtgctcagtgtgtgccaagcactgtgcagagggtacacagttcctgccaggttaacaccctcccttcaggcctcccaaaggcataggcttgcaaagagcagaaggtgtgaaatcacactcttcctctgggcatcctggatccctgaattatccccccccccatgaagtacttcaagggccaagctgcccctttccctcctctccgcccatgaaaatgcctccaaactgagatgctttcagctgagaacagatttgactcacagacattaccaaagaggagcttgtgaatccaggaaaagctccagggggctagctgatctgagcagagagctttcagtgacccattttcctgtctagactctgccttaagctagtggcaactgctggggccccaggtacttgggacatggaaactcgttggatggctgggcagatgtaagcctgtccatgcagtcagccgatcctctgctcaggttcagctggactctgccatctgtgggcccagcatcactctgtaagttccttgaaaggaagaacaaccttagagtatttctgatacaaaatgagggcctctgctcttgatttaattataaaatgtctacgtctttctccagtttctgagccctatgcacattggcttgtgggcttgttcttcctgccaaatgatcagagagggaacattccatttatttgtagtggatttcctctggagggcatgtacccacactaaataccaactgctcttcctcagctgtagtccccaacatcagacttggcacgtggtggacactaacacacaggcactcaatgaatgagtgaaggaaataaaagtcaccccccgttggtgagaaggtgcctatccccctgagtcctcagtgcaggaccagtggatgaaaggcaaggtaaagaggcccaagataggctggcttcccccgttcaaggtatagtctgcctttaagggagttttagaaccaacatgcaagacattgaaagaaatcttgcaagagccattattgacttagatccaaaacagcctctctcatgtctaaaaaggcacagaattttgcagatctgaggaagagggatgcattacctttttgcttcttttcaattgcttagtgtttctaatcatacttaatccacactaatgtgcgcaattataataaatgctaaaatatcaaaaaaaaaa

SEQ ID NO: 224 - protein, 452 aa, Homo sapiens
MQRQAPYNIRRSSTSGDTEEEEEEEVVPFSSDEQKRRSEAASGVLRRTAPREHSYVLSAAKKSTGSPTQETQAPFIAKRVEVVEEDGPSEKSQDPPALARSTPGSNSSRGEEIVRLQILTPRAGLRLVAPDVEGMSSSATSVSAVPADRKSNSTAAQEDAKADPKGALADCEGKDVPTRVGEAWQERPGAPRGGQGDPAVPAQQPADPSTPERQSSPSGSEQLVRRESCGSSVLTDFEGKDVATKVGEAWQDRPRAPRGGQGDPAVPTQQPADPSTPEQQNSPSGSEQFVRRESCTSRVRSPSSCMVTVTVTATSEQPHIYIPAPASELDSSSTTKGILFVKEYVNASEVSSGKPVSARYSNVSSIEDSFAMEKKPPCGSTPYSERTTGGICTYCNREIRDCPKITLEHLGICCHEYCFKCGICSKPMGDLLDQIFIHRDTIHCGKCYEKLF

SEQ ID NO: 225 - DNA, 2683 bp, Homo sapiens
cagtcggctcggaattggacttgggaggcgcggtgaggagtcaggcttaaaacttgttggaggggagtaaccagcctgctcctctcgctctcctcctcgtctgcgccgcgtttcagagagaaaattcctgttccaagagaaaataaggcaacatcaatgaaggagagaagagccagccagaaattatccagcaaatctatcatggatcctaatcagaacgtgaaatgcaagatagttgtggtgggagacagtcagtgtggaaaaactgcgctgctccatgtcttcgccaaggactgcttccccgagaattacgttcctacagtgtttgagaattacacggccagttttgaaatcgacacacaaagaatagagttgagcctgtgggacacttcgggttctccttactatgacaatgtccgccccctctcttaccctgattcggatgctgtgctgatttgctttgacatcagtagaccagagaccctggacagtgtcctcaaaaagtggaaaggtgaaatccaggaattttgtccaaataccaaaatgctcttggtcggctgcaagtctgatctgcggacagatgttagtacattagtagagctctccaatcacaggcagacgccagtgtcctatgaccagggggcaaatatggccaaacagattggagcagctacttatatcgaatgctcagctttacagtcggaaaatagcgtcagagacatttttcacgttgccaccttggcatgtgtaaataagacaaataaaaacgttaagcggaacaaatcacagagagccacaaagcggatttcacacatgcctagcagaccagaactctcggcagttgctacggacttacgaaaggacaaagcgaagagctgcactgtgatgtgaatctttcattatctttaatgaagacaaaggaatctagtgtaaaaaacaacagcaaacaaaaaggtgaagtctaaatgaagtgcacagccaaagtcatgtataccagaggcttaggaggcgtttgagaggatactcatctttttggaatcctgaccttaggttcggcatgtagaccaagtgatgagaagtgaatacatggaagagtttttaagtgtgacttgaaaaatatgccaaaaaatgagagatacaaatgagctagaggaagatgaggggggatgcgagtacctccaagaagaaaaatcacactctgaatggtgcttgcatttttgggttttttttttttgttataatctattcatggatctccactttgatttaatttttaaatgttttaatctcctttacaaaaagtatacgttaatataccgtcctcaagggggaactggcactgtgaccttagcatttagttttctagaggatgtgatctaatttctttctagctcatcattaaaaaggaaattgtatcaggacccatgggatatatccagaggcaaactttatgaggctttgaaatcttgccttcctgaagatagctgagtaggatggttctaaggaaagcctttgcaatcttgcaagatttgtagaccagcactacaaagatcgcatagatcaaataggaaaaaaaatgtcgatttttattcagtctgatggttctgttcttcattgtgattgtcattaaaaagtggtaaattgctcaatgtaatatttttgtgcgctgtttagaagttgtgtgattttttgccatcgttgataaaaatgcaaagtcaaataaaaggtgtcttggtttgatgtcatagaatgatccaaggagagaaaaaaggtagttactgttttcaccagaaaaggtaatgagtgaaggaaagaatagtagcagaaagcacagtttgtgagtaaagctgtctggaattaagttaccaaaaatacaaagcaaaaggactattattttgggttgaagctccaaaactgacagcatctgataatctgttggtttatttcacttttcattaaatgaacattgatgagagaagatgccacttacccaagctttagagaatccctagtggaagattatatgataaactttcagtcctgacataacactagggcatttctagagtgtcattgctaaaacctcactgaacagatgcagccaaggtctgtgttcagcacttggtctctgttgttacgtaaaataataagcatttaaaatagtttacagatatttttgaccagttccttttagagattctttcagagaagaaaccagatctgacctgtttattgttggcgcttgttgaaaacgagctttctttcccatgatagtgcttcgtttttgaagtgttgaagctgtgctccccttaaatcgtggcaggagagattaaggtaattacaacactcagttctatgtcttacaagcactttgtcttgtctctgcaagaaaattcgattccagtcatttcccataaaatacagacattttaccaacataatatgctttgattgatgcagcattatgctttgggcagtattacaaaatagctggcgagtgctttctgtatttaaatattgtaaaaagaaaataagttataactgttataaagcagaacttttgttgcattttttaaactgttgaagtcactgtgtatgtttgtttggtcaatgtttccgcagtatttattaaaacatactttttttttcttcaaataaaaaagtaaccatgtctttgtctaaa

SEQ ID NO: 226 - protein, 244 aa, Homo sapiens
MKERRASQKLSSKSIMDPNQNVKCKIVVVGDSQCGKTALLHVFAKDCFPENYVPTVFENYTASFEIDTQRIELSLWDTSGSPYYDNVRPLSYPDSDAVLICFDISRPETLDSVLKKWKGEIQEFCPNTKMLLVGCKSDLRTDVSTLVELSNHRQTPVSYDQGANMAKQIGAATYIECSALQSENSVRDIFHVATLACVNKTNKNVKRNKSQRATKRISHMPSRPELSAVATDLRKDKAKSCTVM

SEQ ID NO: 227 - DNA, 4168 bp, Homo sapiens
aagacttaggaagactggtggatgcgtttgggttgtagctaggctttttcttttctttctcttttaaaacacatctagacaaggaaaaaacaagcctcggatctgatttttcactcctcgttcttgtgcttggttcttactgtgtttgtgtattttaaaggcgagaagacgaggggaacaaaaccagctggatccatccatcaccgtgggtggttttaatttttcgttttttctcgttatttttttttaaacaaccactcttcacaatgaacaaactgtatatcggaaacctcagcgagaacgccgccccctcggacctagaaagtatcttcaaggacgccaagatcccggtgtcgggacccttcctggtgaagactggctacgcgttcgtggactgcccggacgagagctgggccctcaaggccatcgaggcgctttcaggtaaaatagaactgcacgggaaacccatagaagttgagcactcggtcccaaaaaggcaaaggattcggaaacttcagatacgaaatatcccgcctcatttacagtgggaggtgctggatagtttactagtccagtatggagtggtggagagctgtgagcaagtgaacactgactcggaaactgcagttgtaaatgtaacctattccagtaaggaccaagctagacaagcactagacaaactgaatggatttcagttagagaatttcaccttgaaagtagcctatatccctgatgaaatggccgcccagcaaaaccccttgcagcagccccgaggtcgccgggggcttgggcagaggggctcctcaaggcaggggtctccaggatccgtatccaagcagaaaccatgtgatttgcctctgcgcctgctggttcccacccaatttgttggagccatcataggaaaagaaggtgccaccattcggaacatcaccaaacagacccagtctaaaatcgatgtccaccgtaaagaaaatgcgggggctgctgagaagtcgattactatcctctctactcctgaaggcacctctgcggcttgtaagtctattctggagattatgcataaggaagctcaagatataaaattcacagaagagatccccttgaagattttagctcataataactttgttggacgtcttattggtaaagaaggaagaaatcttaaaaaaattgagcaagacacagacactaaaatcacgatatctccattgcaggaattgacgctgtataatccagaacgcactattacagttaaaggcaatgttgagacatgtgccaaagctgaggaggagatcatgaagaaaatcagggagtcttatgaaaatgatattgcttctatgaatcttcaagcacatttaattcctggattaaatctgaacgccttgggtctgttcccacccacttcagggatgccacctcccacctcagggcccccttcagccatgactcctccctacccgcagtttgagcaatcagaaacggagactgttcatctgtttatcccagctctatcagtcggtgccatcatcggcaagcagggccagcacatcaagcagctttctcgctttgctggagcttcaattaagattgctccagcggaagcaccagatgctaaagtgaggatggtgattatcactggaccaccagaggctcagttcaaggctcagggaagaatttatggaaaaattaaagaagaaaactttgttagtcctaaagaagaggtgaaacttgaagctcatatcagagtgccatcctttgctgctggcagagttattggaaaaggaggcaaaacggtgaatgaacttcagaatttgtcaagtgcagaagttgttgtccctcgtgaccagacacctgatgagaatgaccaagtggttgtcaaaataactggtcacttctatgcttgccaggttgcccagagaaaaattcaggaaattctgactcaggtaaagcagcaccaacaacagaaggctctgcaaagtggaccacctcagtcaagacggaagtaaaggctcaggaaacagcccaccacagaggcagatgccaaaccaaagacagattgcttaaccaacagatgggcgctgaccccctatccagaatcacatgcacaagtttttacctagccagttgtttctgaggaccaggcaacttttgaactcctgtctctgtgagaatgtatactttatgctctctgaaatgtatgacacccagctttaaaacaaacaaacaaacaaacaaaaaaagggtgggggagggagggaaagagaagagctctgcacttccctttgttgtagtctcacagtataacagatattctaattcttcttaatattcccccataatgccagaaattggcttaatgatgctttcactaaattcatcaaatagattgctcctaaatccaattgttaaaattggatcagaataattatcacaggaacttaaatgttaagccattagcatagaaaaactgttctcagttttatttttacctaacactaacatgagtaacctaagggaagtgctgaatggtgttggcaggggtattaaacgtgcatttttactcaactacctcaggtattcagtaatacaatgaaaagcaaaattgttccttttttttgaaaattttatatactttataatgatagaagtccaaccgttttttaaaaaataaatttaaaatttaacagcaatcagctaacaggcaaattaagatttttacttctggctggtgacagtaaagctggaaaattaatttcagggttttttgaggcttttgacacagttattagttaaatcaaatgttcaaaaatacggagcagtgcctagtatctggagagcagcactaccatttattctttcatttatagttgggaaagtttttgacggtactaacaaagtggtcgcaggagattttggaacggctggtttaaatggcttcaggagacttcagttttttgtttagctacatgattgaatgcataataaatgctttgtgcttctgactatcaatacctaaagaaagtgcatcagtgaagagatgcaagactttcaactgactggcaaaaagcaagctttagcttgtcttataggatgcttagtttgccactacacttcagaccaatgggacagtcatagatggtgtgacagtgtttaaacgcaacaaaaggctacatttccatggggccagcactgtcatgagcctcactaagctattttgaagatttttaagcactgataaattaaaaaaaaaaaattagactccaccttaagtagtaaagtataacaggatttctgtatactgtgcaatcagttctttgaaaaaaaagtcaaaagatagagaatacaagaaaagtttttgggatataatttgaatgactgtgaaaacatatgacctttgataacgaactcatttgctcactccttgacagcaaagcccagtacgtacaattgtgttgggtgtgggtggtctccaaggccacgctgctctctgaattgattttttgagttttgtttgtaagatgatcacagtcatgttacactgatctaaaggacatatatataaccctttaaaaaaaaaatcactgcctcattcttatttcaagatgaatttctatacagactagatgtttttctgaagatcaattagacattttgaaaatgatttaaagtgttttccttaatgttctctgaaaacaagtttcttttgtagttttaaccaaaaaagtgccctttttgtcactggattctcctagcattcatgatttttttttcatacaatgaattaaaattgctaaaatcatggactggctttctggttggatttcaggtaagatgtgtttaaggccagagcttttctcagtatttgatttttttccccaatatttgattttttaaaaatatacacataggtgctgcatttatatctgctggtttaaattctgtcatatttcacttctagccttttagtatggcaaatcatattttacttttacttaagcatttgtaatttggagtatctggtactagctaagaaataattctataattgagttttgtactcaccatatatggatcattcctcatgtataatgtgccccaaatgcagcttcattttccagataccttgacgcagaataaattttttcatcatttaggtgcaaaaaaaaaa

SEQ ID NO: 228 - protein, 579 aa, Homo sapiens
MNKLYIGNLSENAAPSDLESIFKDAKIPVSGPFLVKTGYAFVDCPDESWALKAIEALSGKIELHGKPIEVEHSVPKRQRIRKLQIRNIPPHLQWEVLDSLLVQYGVVESCEQVNTDSETAVVNVTYSSKDQARQALDKLNGFQLENFTLKVAYIPDEMAAQQNPLQQPRGRRGLGQRGSSRQGSPGSVSKQKPCDLPLRLLVPTQFVGAIIGKEGATIRNITKQTQSKIDVHRKENAGAAEKSITILSTPEGTSAACKSILEIMHKEAQDIKFTEEIPLKILAHNNFVGRLIGKEGRNLKKIEQDTDTKITISPLQELTLYNPERTITVKGNVETCAKAEEEIMKKIRESYENDIASMNLQAHLIPGLNLNALGLFPPTSGMPPPTSGPPSAMTPPYPQFEQSETETVHLFIPALSVGAIIGKQGQHIKQLSRFAGASIKIAPAEAPDAKVRMVIITGPPEAQFKAQGRIYGKIKEENFVSPKEEVKLEAHIRVPSFAAGRVIGKGGKTVNELQNLSSAEVVVPRDQTPDENDQVVVKITGHFYACQVAQRKIQEILTQVKQHQQQKALQSGPPQSRRK

SEQ ID NO: 229 - DNA, 2786 bp, Homo sapiens
agcactctccagcctctcaccgcaaaattacacaccccagtacaccagcagaggaaacttataacctcgggaggcgggtccttcccctcagtgcggtcacatacttccagaagagcggaccagggctgctgccagcacctgccactcagagcgcctctgtcgctgggacccttcagaactctctttgctcacaagttaccaaaaaaaaaagagccaacatgttggtattgctggctggtatctttgtggtccacatcgctactgttattatgctatttgttagcaccattgccaatgtctggttggtttccaatacggtagatgcatcagtaggtctttggaaaaactgtaccaacattagctgcagtgacagcctgtcatatgccagtgaagatgccctcaagacagtgcaggccttcatgattctctctatcatcttctgtgtcattgccctcctggtcttcgtgttccagctcttcaccatggagaagggaaaccggttcttcctctcaggggccaccacactggtgtgctggctgtgcattcttgtgggggtgtccatctacactagtcattatgcgaatcgtgatggaacgcagtatcaccacggctattcctacatcctgggctggatctgcttctgcttcagcttcatcatcggcgttctctatctggtcctgagaaagaaataaggccggacgagttcatggggatctggggggtggggaggaggaagccgttgaatctgggagggaagtggaggttgctgtacaggaaaaaccgagataggggaggggggagggggaagcaaaggggggaggtcaaatcccaaaccattactgaggggattctctactgccaagcccctgccctggggagaaagtagttggctagtactttgatgctcccttgatggggtccagagagcctccctgcagccaccagacttggcctccagctgttcttagtgacacacactgtctggggccccatcagctgccacaacaccagccccacttctgggtcatgcactgaggtccacagacctactgcactgagttaaaatagcggtacaagttctggcaagagcagatactgtctttgtgctgaatacgctaagcctggaagccatcctgcccttctgacccaaagcaaaacatcacattccagtctgaagtgcctactggggggctttggcctgtgagccattgtccctctttggaacagatatttagctctgtggaattcagtgacaaaatgggaggaggaaagagagtttgtaaggtcatgctggtgggttagctaaaccaagaaggagaccttttcacaatggaaaacctgggggatggtcagagcccagtcgagacctcacacacggctgtccctcatggagacctcatgccatggtctttgctaggcctcttgctgaaagccaaggcagctcttctggagtttctctaaagtcactagtgaacaattcggtggtaaaagtaccacacaaactatgggatccaaggggcagtcttgcaacagtgccatgttagggttatgtttttaggattcccctcaatgcagtcagtgtttcttttaagtatacaacaggagagagatggacatggctcattgtagcacaatcctattactcttcctctaacatttttgaggaagttttgtctaattatcaatattgaggatcagggctcctaggctcagtggtagctctggcttagacaccacctggagtgatcacctcttggggaccctgcctatcccacttcacaggtgaggcatggcaattctggaagctgattaaaacacacataaaccaaaaccaaacaacaggcccttgggtgaaaggtgctatataattgtgaagtattaagcctaccgtatttcagccatgataagaacagagtgcctgcattcccaggaaaatacgaaaatcccatgagataaataaaaatataggtgatgggcagatcttttctttaaaataaaaaagcaaaaactcttgtggtacctagtcagatggtagacgagctgtctgctgccgcaggagcacctctatacaggacttagaagtagtatgttattcctggttaagcaggcattgctttgccctggagcagctattttaagccatctcagattctgtctaaaggggttttttgggaagacgttttctttatcgccctgagaagatctaccccagggagaatctgagacatcttgcctacttttctttattagctttctcctcatccatttcttttatacctttcctttttggggagttgttatgccatgatttttggtatttatgtaaaaggattattactaattctatttctctatgtttattctagttaaggaaatgttgagggcaagccaccaaattacctaggctgaggttagagagattggccagcaaaaactgtgggaagatgaactttgtcattatgatttcattatcacatgattatagaaggctgtcttagtgcaaaaaacatacttacatttcagacatatccaaagggaatactcacattttgttaagaagttgaactatgactggagtaaaccatgtattcccttatcttttactttttttctgtgacatttatgtctcatgtaatttgcattactctggtggattgttctagtactgtattgggcttcttcgttaatagattatttcatatactataattgtaaatattttgatacaaatgtttataactctagggatataaaaacagattctgattcccttcaaaaaaaaaaaa

SEQ ID NO: 230 - protein, 157 aa, Homo sapiens
MLVLLAGIFVVHIATVIMLFVSTIANVWLVSNTVDASVGLWKNCTNISCSDSLSYASEDALKTVQAFMILSIIFCVIALLVFVFQLFTMEKGNRFFLSGATTLVCWLCILVGVSIYTSHYANRDGTQYHHGYSYILGWICFCFSFIIGVLYLVLRKK

SEQ ID NO: 231 - DNA, 2805 bp, Homo sapiens
cgggtctgatagtccctacctgtcaggactggtgttaggatgagataatgtttgtgaactgtaaacatatataaacgtgtgctactgtgagaactggaacaaagaagagagggagtgagagaaatcaagggagggctggggctgggaaagaacgaaaagggagtcgcgtatagaggagaggcgacagtcgcgagccacactttgcaatgaaactctttagactttctgccgggagagcggcccagacgcgccaggtctgtagcaggaggccgcgagggcgggtccccagaagcctacaggtgagtatcggttctccccttcccggctttcggtccggaggaggcgggagcagcttccctgttctgatcctatcgcgggcggcgcagggccggcttggccttccgtgggacggggaggggggcgggatgtgtcacccaaataccagtggggacggtcggtggtggaaccagccgggcaggtcgggtagagtataagagccggagggagcggccggggcgcagacgcctgcagaccatcccagacgccggagcccgagccccgacgagtccccgcgcctcatccgcccgcgtccggtccgcgttcctccgccccaccatggctcggggccccggcctcgcgccgccaccgctgcggctgccgctgctgctgctggtgctggcggcggtgaccggccacacggccgcgcaggacaactgcacgtgtcccaccaacaagatgaccgtgtgcagccccgacggccccggcggccgctgccagtgccgcgcgctgggctcgggcatggcggtcgactgctccacgctgacctccaagtgtctgctgctcaaggcgcgcatgagcgcccccaagaacgcccgcacgctggtgcggccgagtgagcacgcgctcgtggacaacgatggcctctacgaccccgactgcgaccccgagggccgcttcaaggcgcgccagtgcaaccagacgtcggtgtgctggtgcgtgaactcggtgggcgtgcgccgcacggacaagggcgacctgagcctacgctgcgatgagctggtgcgcacccaccacatcctcattgacctgcgccaccgccccaccgccggcgccttcaaccactcagacctggacgccgagctgaggcggctcttccgcgagcgctatcggctgcaccccaagttcgtggcggccgtgcactacgagcagcccaccatccagatcgagctgcggcagaacacgtctcagaaggccgccggtgaagtggatatcggcgatgccgcctactacttcgagagggacatcaagggcgagtctctattccagggccgcggcggcctggacttgcgcgtgcgcggagaacccctgcaggtggagcgcacgctcatctattacctggacgagattcccccgaagttctccatgaagcgcctcaccgccggcctcatcgccgtcatcgtggtggtcgtggtggccctcgtcgccggcatggccgtcctggtgatcaccaaccggagaaagtcggggaagtacaagaaggtggagatcaaggaactgggggagttgagaaaggaaccgagcttgtaggtacccggcggggcaggggatggggtggggtaccggatttcggtatcgtcccagacccaagtgagtcacgcttcctgattcctcggcgcaaaggagacgtttatcctttcaaattcctgccttccccctcccttttgcgcacacaccaggtttaatagatcctggcctcagggtctcctttctttctcacttctgtcttgagggaagcatttctaaaatgtatcccctttcggtccaacaacaggaaacctgactggggcagtgaaggaagggatggcacagcgttatgtgtaaaaaacaagtatctgtatgacaacccgggatcgtttgcaagtaactgaatccattgcgacattgtgaaggcttaaatgagtttagatgggaaatagcgttgttatcgccttgggtttaaattatttgatgagttccacttgtatcatggcctacccgaggagaagaggagtttgttaactgggcctatgtagtagcctcatttaccatcgtttgtattactgaccacatatgcttgtcactgggaaagaagcctgtttcagctgcctgaacgcagtttggatgtctttgaggacagacattgcccggaaactcagtctatttattcttcagcttgcccttactgccactgatattggtaatgttcttttttgtaaaatgtttgtacatatgttgtctttgataatgttgctgtaattttttaaaataaaacacgaatttaataaaatatgggaaaggcacaaaccagaagtcggcatttgtgaaaagtccctccagatttctatcactttggtctctaatttcccaagacttgtattttttttttatttcaaattataacacttttttttcccccagaagtgggtgtttcatgttgctactctggtgtgtcccaagatatcctaactggccagtgtaaatgctattctttctaaataagattatttggaaacttccttcaaactgcaggagggcgagctctgagggcacgagaagctaaaactagctgcttttgatgaaaaagagtgccagtctttggtcatctctaaacaaggcttatcaccaatggagacagaaaactctagttcaagagctgtacctcctttgaatcccagccctactcgaaataagtggtactatttccatttagcctttgagcaaatcacttaactcaaaggcgttgtggctctaagattaaacgacttt

SEQ ID NO: 232 - protein, 323 aa, Homo sapiens
MARGPGLAPPPLRLPLLLLVLAAVTGHTAAQDNCTCPTNKMTVCSPDGPGGRCQCRALGSGMAVDCSTLTSKCLLLKARMSAPKNARTLVRPSEHALVDNDGLYDPDCDPEGRFKARQCNQTSVCWCVNSVGVRRTDKGDLSLRCDELVRTHHILIDLRHRPTAGAFNHSDLDAELRRLFRERYRLHPKFVAAVHYEQPTIQIELRQNTSQKAAGEVDIGDAAYYFERDIKGESLFQGRGGLDLRVRGEPLQVERTLIYYLDEIPPKFSMKRLTAGLIAVIVVVVVALVAGMAVLVITNRRKSGKYKKVEIKELGELRKEPSL

SEQ ID NO: 233 - DNA, 3127 bp, Homo sapiens
gccgggcagtgggcaggtatggctgagggcgtgtgagcgccgagcgctaagggccgccgccaccatgccagggggcgcaggcgccgcccggctctgcttgctggcgtttgccctgcagcccctccggccgcgggcggcgcgggagcctggatggacaagtaaaggaagtgaggaaggcagccccaagctgcagcatgaacttatcatacctcagtggaagacttcagaaagccccgtgagagaaaagcatccactcaaagctgagctcagggtaatggctgaggggcgagaactgatcctggacctggagaagaatgagcaactttttgctccttcctacacagaaacccattatacttcaagtggtaaccctcaaaccaccacacggaaattggaggatcactgcttttaccacggcacggtgagggagacagaactgtccagcgtcacgctcagcacttgccgaggaattagaggactgattacggtgagcagcaacctcagctacgtcatcgagcccctccctgacagcaagggccaacaccttatttacagatctgaacatctcaagccgcccccgggaaactgtgggttcgagcactccaagcccaccaccagggactgggctcttcagtttacacaacagaccaagaagcgacctcgcaggatgaaaagggaagatttaaactccatgaagtatgtggagctttacctcgtggctgattatttagagtttcagaagaatcgacgagaccaggacgccaccaaacacaagctcatagagatcgccaactatgttgataagttttaccgatccttgaacatccggattgctctcgtgggcttggaagtgtggacccacgggaacatgtgtgaagtttcagagaatccatattctaccctctggtcctttctcagttggaggcgcaagctgcttgcccagaagtaccatgacaacgcccaattaatcacgggcatgtccttccacggcaccaccatcggcctggcccccctcatggccatgtgctctgtgtaccagtctggaggagtcaacatggaccactccgagaatgccattggcgtggctgccaccatggcccacgagatgggccacaactttggcatgacccatgattctgcagattgctgctcggccagtgcggctgatggtgggtgcatcatggcagctgccactgggcacccctttcccaaagtgttcaatggatgcaacaggagggagctggacaggtatctgcagtcaggtggtggaatgtgtctctccaacatgccagacaccaggatgttgtatggaggccggaggtgtgggaacgggtatctggaagatggggaagagtgtgactgtggagaagaagaggaatgtaacaacccctgctgcaatgcctctaattgtaccctgaggccgggggcggagtgtgctcacggctcctgctgccaccagtgtaagctgttggctcctgggaccctgtgccgcgagcaggccaggcagtgtgacctcccggagttctgtacgggcaagtctccccactgccctaccaacttctaccagatggatggtaccccctgtgagggcggccaggcctactgctacaacggcatgtgcctcacctaccaggagcagtgccagcagctgtggggacccggagcccgacctgcccctgacctctgcttcgagaaggtgaatgtggcaggagacacctttggaaactgtggaaaggacatgaatggtgaacacaggaagtgcaacatgagagatgcgaagtgtgggaagatccagtgtcagagctctgaggcccggcccctggagtccaacgcggtgcccattgacaccactatcatcatgaatgggaggcagatccagtgccggggcacccacgtctaccgaggtcctgaggaggagggtgacatgctggacccagggctggtgatgactggaaccaagtgtggctacaaccatatttgctttgaggggcagtgcaggaacacctccttctttgaaactgaaggctgtgggaagaagtgcaatggccatggggtctgtaacaacaaccagaactgccactgcctgccgggctgggccccgcccttctgcaacacaccgggccacgggggcagtatcgacagtgggcctatgccccctgagagtgtgggtcctgtggtagctggagtgttggtggccatcttggtgctggcggtcctcatgctgatgtactactgctgcagacagaacaacaaactaggccaactcaagccctcagctctcccttccaagctgaggcaacagttcagttgtcccttcagggtttctcagaacagcgggactggtcatgccaacccaactttcaagctgcagacgccccagggcaagcgaaaggtgatcaacactccggaaatcctgcggaagccctcccagcctcctccccggccccctccagattatctgcgtggtgggtccccacctgcaccactgccagctcacctgagcagggctgctaggaactccccagggcccgggtctcaaatagagaggacggagtcgtccaggaggcctcctccaagccggccaattccccccgcaccaaattgcatcgtttcccaggacttctccaggcctcggccgccccagaaggcactcccggcaaacccagtgccaggccgcaggagcctccccaggccaggaggtgcatccccactgcggccccctggtgctggccctcagcagtcccggcctctggcagcacttgccccaaaggtgagtccacgggaagccctcaaggtgaaagctggtaccagagggctccaggggggcaggtgtagagttgagaaaacaaagcaattcatgcttcttgtggtctggactgaacttccagaacaaaagccaagggcaaaacattcatgtttcttggtgcccgcttgactgtggagttttggcttcatgtgaaaggtgattcttagaatcctgagctgtggtggcttcagtcctgcccctgcacctgacctggggagggaccctgagcaagtccctcttgagtctgtttcctcatttgtacagaggctatgatgagcagtagtaccagccccatcaggttgttgtgaagagcaaggaagt

SEQ ID NO: 234 - protein, 956 aa, Homo sapiens
MPGGAGAARLCLLAFALQPLRPRAAREPGWTSKGSEEGSPKLQHELIIPQWKTSESPVREKHPLKAELRVMAEGRELILDLEKNEQLFAPSYTETHYTSSGNPQTTTRKLEDHCFYHGTVRETELSSVTLSTCRGIRGLITVSSNLSYVIEPLPDSKGQHLIYRSEHLKPPPGNCGFEHSKPTTRDWALQFTQQTKKRPRRMKREDLNSMKYVELYLVADYLEFQKNRRDQDATKHKLIEIANYVDKFYRSLNIRIALVGLEVWTHGNMCEVSENPYSTLWSFLSWRRKLLAQKYHDNAQLITGMSFHGTTIGLAPLMAMCSVYQSGGVNMDHSENAIGVAATMAHEMGHNFGMTHDSADCCSASAADGGCIMAAATGHPFPKVFNGCNRRELDRYLQSGGGMCLSNMPDTRMLYGGRRCGNGYLEDGEECDCGEEEECNNPCCNASNCTLRPGAECAHGSCCHQCKLLAPGTLCREQARQCDLPEFCTGKSPHCPTNFYQMDGTPCEGGQAYCYNGMCLTYQEQCQQLWGPGARPAPDLCFEKVNVAGDTFGNCGKDMNGEHRKCNMRDAKCGKIQCQSSEARPLESNAVPIDTTIIMNGRQIQCRGTHVYRGPEEEGDMLDPGLVMTGTKCGYNHICFEGQCRNTSFFETEGCGKKCNGHGVCNNNQNCHCLPGWAPPFCNTPGHGGSIDSGPMPPESVGPVVAGVLVAILVLAVLMLMYYCCRQNNKLGQLKPSALPSKLRQQFSCPFRVSQNSGTGHANPTFKLQTPQGKRKVINTPEILRKPSQPPPRPPPDYLRGGSPPAPLPAHLSRAARNSPGPGSQIERTESSRRPPPSRPIPPAPNCIVSQDFSRPRPPQKALPANPVPGRRSLPRPGGASPLRPPGAGPQQSRPLAALAPKVSPREALKVKAGTRGLQGGRCRVEKTKQFMLLVVWTELPEQKPRAKHSCFLVPA

SEQ ID NO: 235 - DNA, 2254 bp, Homo sapiens
aatcgaaagtagactcttttctgaagcatttcctgggatcagcctgaccacgctccatactgggagaggcttctgggtcaaaggaccagtctgcagagggatcctgtggctggaagcgaggaggctccacacggccgttgcagctaccgcagccaggatctgggcatccaggcacggccatgacccctccgaggctcttctgggtgtggctgctggttgcaggaacccaaggcgtgaacgatggtgacatgcggctggccgatgggggcgccaccaaccagggccgcgtggagatcttctacagaggccagtggggcactgtgtgtgacaacctgtgggacctgactgatgccagcgtcgtctgccgggccctgggcttcgagaacgccacccaggctctgggcagagctgccttcgggcaaggatcaggccccatcatgctggacgaggtccagtgcacgggaaccgaggcctcactggccgactgcaagtccctgggctggctgaagagcaactgcaggcacgagagagacgctggtgtggtctgcaccaatgaaaccaggagcacccacaccctggacctctccagggagctctcggaggcccttggccagatctttgacagccagcggggctgcgacctgtccatcagcgtgaatgtgcagggcgaggacgccctgggcttctgtggccacacggtcatcctgactgccaacctggaggcccaggccctgtggaaggagccgggcagcaatgtcaccatgagtgtggatgctgagtgtgtgcccatggtcagggaccttctcaggtacttctactcccgaaggattgacatcaccctgtcgtcagtcaagtgcttccacaagctggcctctgcctatggggccaggcagctgcagggctactgcgcaagcctctttgccatcctcctcccccaggacccctcgttccagatgcccctggacctgtatgcctatgcagtggccacaggggacgccctgctggagaagctctgcctacagttcctggcctggaacttcgaggccttgacgcaggccgaggcctggcccagtgtccccacagacctgctccaactgctgctgcccaggagcgacctggcggtgcccagcgagctggccctactgaaggccgtggacacctggagctggggggagcgtgcctcccatgaggaggtggagggcttggtggagaagatccgcttccccatgatgctccctgaggagctctttgagctgcagttcaacctgtccctgtactggagccacgaggccctgttccagaagaagactctgcaggccctggaattccacactgtgcccttccagttgctggcccggtacaaaggcctgaacctcaccgaggatacctacaagccccggatttacacctcgcccacctggagtgcctttgtgacagacagttcctggagtgcacggaagtcacaactggtctatcagtccagacgggggcctttggtcaaatattcttctgattacttccaagccccctctgactacagatactacccctaccagtccttccagactccacaacaccccagcttcctcttccaggacaagagggtgtcctggtccctggtctacctccccaccatccagagctgctggaactacggcttctcctgctcctcggacgagctccctgtcctgggcctcaccaagtctggcggctcagatcgcaccattgcctacgaaaacaaagccctgatgctctgcgaagggctcttcgtggcagacgtcaccgatttcgagggctggaaggctgcgattcccagtgccctggacaccaacagctcgaagagcacctcctccttcccctgcccggcagggcacttcaacggcttccgcacggtcatccgccccttctacctgaccaactcctcaggtgtggactagacgcgtggccaagggtggtgagaaccggagaaccccaggacgccctcactgcaggctcccctcctcggcttccttcctctctgcaatgaccttcaacaaccggccaccagatgtcgccctactcacctgaggctcagcttcaagaaattactggaaggcttccactagggtccaccaggagttctcccaccacctcaccagtttccaggtggtaagcaccaggaggccctcgaggttgctctggatccccccacagcccctggtcagtctgcccttgtcactggtctgaggtcattaaaattacattgaggttccta

SEQ ID NO: 236 - protein, 585 aa, Homo sapiens
MTPPRLFWVWLLVAGTQGVNDGDMRLADGGATNQGRVEIFYRGQWGTVCDNLWDLTDASVVCRALGFENATQALGRAAFGQGSGPIMLDEVQCTGTEASLADCKSLGWLKSNCRHERDAGVVCTNETRSTHTLDLSRELSEALGQIFDSQRGCDLSISVNVQGEDALGFCGHTVILTANLEAQALWKEPGSNVTMSVDAECVPMVRDLLRYFYSRRIDITLSSVKCFHKLASAYGARQLQGYCASLFAILLPQDPSFQMPLDLYAYAVATGDALLEKLCLQFLAWNFEALTQAEAWPSVPTDLLQLLLPRSDLAVPSELALLKAVDTWSWGERASHEEVEGLVEKIRFPMMLPEELFELQFNLSLYWSHEALFQKKTLQALEFHTVPFQLLARYKGLNLTEDTYKPRIYTSPTWSAFVTDSSWSARKSQLVYQSRRGPLVKYSSDYFQAPSDYRYYPYQSFQTPQHPSFLFQDKRVSWSLVYLPTIQSCWNYGFSCSSDELPVLGLTKSGGSDRTIAYENKALMLCEGLFVADVTDFEGWKAAIPSALDTNSSKSTSSFPCPAGHFNGFRTVIRPFYLTNSSGVD

SEQ ID NO: 237 - DNA, 3649 bp, Homo sapiens
cccgctgtagccgcgtgtgggaggacgcacgggcctgcttcaaagctttgggataacagcgcctccgggggataatgaatgcggagcctccgttttcagtcgacttcagatgtgtctccacttttttccgctgtagccgcaaggcaaggaaacatttctcttcccgtactgaggaggctgaggagtgcactgggtgttcttttctcctctaacccagaactgcgagacagaggctgagtccctgtaaagaacagctccagaaaagccaggagagcgcaggagggcatccgggaggccaggaggggttcgctggggcctcaaccgcacccacatcggtcccacctgcgagggggcgggacctcgtggcgctggaccaatcagcacccacctgcgctcacctggcctcctcccgctggctcccgggggctgcggtgctcaaaggggcaagagctgagcggaacaccggcccgccgtcgcggcagctgcttcacccctctctctgcagccatggggctccctcgtggacctctcgcgtctctcctccttctccaggtttgctggctgcagtgcgcggcctccgagccgtgccgggcggtcttcagggaggctgaagtgaccttggaggcgggaggcgcggagcaggagcccggccaggcgctggggaaagtattcatgggctgccctgggcaagagccagctctgtttagcactgataatgatgacttcactgtgcggaatggcgagacagtccaggaaagaaggtcactgaaggaaaggaatccattgaagatcttcccatccaaacgtatcttacgaagacacaagagagattgggtggttgctccaatatctgtccctgaaaatggcaagggtcccttcccccagagactgaatcagctcaagtctaataaagatagagacaccaagattttctacagcatcacggggccgggggcagacagcccccctgagggtgtcttcgctgtagagaaggagacaggctggttgttgttgaataagccactggaccgggaggagattgccaagtatgagctctttggccacgctgtgtcagagaatggtgcctcagtggaggaccccatgaacatctccatcatcgtgaccgaccagaatgaccacaagcccaagtttacccaggacaccttccgagggagtgtcttagagggagtcctaccaggtacttctgtgatgcaggtgacagccacggatgaggatgatgccatctacacctacaatggggtggttgcttactccatccatagccaagaaccaaaggacccacacgacctcatgttcaccattcaccggagcacaggcaccatcagcgtcatctccagtggcctggaccgggaaaaagtccctgagtacacactgaccatccaggccacagacatggatggggacggctccaccaccacggcagtggcagtagtggagatccttgatgccaatgacaatgctcccatgtttgacccccagaagtacgaggcccatgtgcctgagaatgcagtgggccatgaggtgcagaggctgacggtcactgatctggacgcccccaactcaccagcgtggcgtgccacctaccttatcatgggcggtgacgacggggaccattttaccatcaccacccaccctgagagcaaccagggcatcctgacaaccaggaagggtttggattttgaggccaaaaaccagcacaccctgtacgttgaagtgaccaacgaggccccttttgtgctgaagctcccaacctccacagccaccatagtggtccacgtggaggatgtgaatgaggcacctgtgtttgtcccaccctccaaagtcgttgaggtccaggagggcatccccactggggagcctgtgtgtgtctacactgcagaagaccctgacaaggagaatcaaaagatcagctaccgcatcctgagagacccagcagggtggctagccatggacccagacagtgggcaggtcacagctgtgggcaccctcgaccgtgaggatgagcagtttgtgaggaacaacatctatgaagtcatggtcttggccatggacaatggaagccctcccaccactggcacgggaacccttctgctaacactgattgatgtcaatgaccatggcccagtccctgagccccgtcagatcaccatctgcaaccaaagccctgtgcgccaggtgctgaacatcacggacaaggacctgtctccccacacctcccctttccaggcccagctcacagatgactcagacatctactggacggcagaggtcaacgaggaaggtgacacagtggtcttgtccctgaagaagttcctgaagcaggatacatatgacgtgcacctttctctgtctgaccatggcaacaaagagcagctgacggtgatcagggccactgtgtgcgactgccatggccatgtcgaaacctgccctggaccctggaagggaggtttcatcctccctgtgctgggggctgtcctggctctgctgttcctcctgctggtgctgcttttgttggtgagaaagaagcggaagatcaaggagcccctcctactcccagaagatgacacccgtgacaacgtcttctactatggcgaagaggggggtggcgaagaggaccaggactatgacatcacccagctccaccgaggtctggaggccaggccggaggtggttctccgcaatgacgtggcaccaaccatcatcccgacacccatgtaccgtcctcggccagccaacccagatgaaatcggcaactttataattgagaacctgaaggcggctaacacagaccccacagccccgccctacgacaccctcttggtgttcgactatgagggcagcggctccgacgccgcgtccctgagctccctcacctcctccgcctccgaccaagaccaagattacgattatctgaacgagtggggcagccgcttcaagaagctggcagacatgtacggtggcggggaggacgactaggcggcctgcctgcagggctggggaccaaacgtcaggccacagagcatctccaaggggtctcagttcccccttcagctgaggacttcggagcttgtcaggaagtggccgtagcaacttggcggagacaggctatgagtctgacgttagagtggtggcttccttagcctttcaggatggaggaatgtgggcagtttgacttcagcactgaaaacctctccacctgggccagggttgcctcagaggccaagtttccagaagcctcttacctgccgtaaaatgctcaaccctgtgtcctgggcctgggcctgctgtgactgacctacagtggactttctctctggaatggaaccttcttaggcctcctggtgcaacttaatttttttttttaatgctatcttcaaaacgttagagaaagttcttcaaaagtgcagcccagagctgctgggcccactggccgtcctgcatttctggtttccagaccccaatgcctcccattcggatggatctctgcgtttttatactgagtgtgcctaggttgccccttattttttattttccctgttgcgttgctatagatgaagggtgaggacaatcgtgtatatgtactagaacttttttattaaagaaacttttcccagaaaaaaaaaaaaaa

SEQ ID NO: 238 - protein, 829 aa, Homo sapiens
MGLPRGPLASLLLLQVCWLQCAASEPCRAVFREAEVTLEAGGAEQEPGQALGKVFMGCPGQEPALFSTDNDDFTVRNGETVQERRSLKERNPLKIFPSKRILRRHKRDWVVAPISVPENGKGPFPQRLNQLKSNKDRDTKIFYSITGPGADSPPEGVFAVEKETGWLLLNKPLDREEIAKYELFGHAVSENGASVEDPMNISIIVTDQNDHKPKFTQDTFRGSVLEGVLPGTSVMQVTATDEDDAIYTYNGVVAYSIHSQEPKDPHDLMFTIHRSTGTISVISSGLDREKVPEYTLTIQATDMDGDGSTTTAVAVVEILDANDNAPMFDPQKYEAHVPENAVGHEVQRLTVTDLDAPNSPAWRATYLIMGGDDGDHFTITTHPESNQGILTTRKGLDFEAKNQHTLYVEVTNEAPFVLKLPTSTATIVVHVEDVNEAPVFVPPSKVVEVQEGIPTGEPVCVYTAEDPDKENQKISYRILRDPAGWLAMDPDSGQVTAVGTLDREDEQFVRNNIYEVMVLAMDNGSPPTTGTGTLLLTLIDVNDHGPVPEPRQITICNQSPVRQVLNITDKDLSPHTSPFQAQLTDDSDIYWTAEVNEEGDTVVLSLKKFLKQDTYDVHLSLSDHGNKEQLTVIRATVCDCHGHVETCPGPWKGGFILPVLGAVLALLFLLLVLLLLVRKKRKIKEPLLLPEDDTRDNVFYYGEEGGGEEDQDYDITQLHRGLEARPEVVLRNDVAPTIIPTPMYRPRPANPDEIGNFIIENLKAANTDPTAPPYDTLLVFDYEGSGSDAASLSSLTSSASDQDQDYDYLNEWGSRFKKLADMYGGGEDD

SEQ ID NO: 239 - DNA, 1709 bp, Homo sapiens
ggtacctcctgccagcatctcttgggtttgctgagaactcacgggctccagctacctggccatgaccaccacatttctgcaaacttcttcctccacctttgggggtggctcaacccgagggggttccctcctggctgggggaggtggctttggtggggggagtctctctgggggaggtggaagccgaagtatctcagcttcttctgctaggtttgtctcttcagggtcaggaggaggatatgggggtggcatgagggtctgtggctttggtggaggggctggtagtgttttcggtggaggctttggagggggcgttggtgggggttttggtggtggctttggtggtggcgatggtggtctcctctctggcaatgagaaaattaccatgcagaacctcaatgaccgcctggcctcctacctggacaaggtacgtgccctggaggaggccaatgctgacctggaggtgaagatccatgactggtaccagaagcagaccccaaccagcccagaatgcgactacagccaatacttcaagaccattgaagagctccgggacaagatcatggccaccaccatcgacaactcccgggtcatcctggagatcgacaatgccaggctggctgcggacgacttcaggctcaagtatgagaatgagctggccctgcgccagggcgttgaggctgacatcaacggcttgcgccgagtcctggatgagctgaccctggccaggactgacctggagatgcagatcgagggcctgaatgaggagctagcctacctgaagaagaaccacgaagaggagatgaaggagttcagcagccagctggccggccaggtcaatgtggagatggacgcagcaccgggtgtggacctgacccgtgtgctggcagagatgagggagcagtacgaggccatggcggagaagaaccgccgggatgtcgaggcctggttcttcagcaagactgaggagctgaacaaagaggtggcctccaacacagaaatgatccagaccagcaagacggagatcacagacctgagacgcacgatgcaggagctggagatcgagctgcagtcccagctcagcatgaaagctgggctggagaactcactggccgagacagagtgccgctatgccacgcagctgcagcagatccaggggctcattggtggcctggaggcccagctgagtgagctccgatgcgagatggaggctcagaaccaggagtacaagatgctgcttgacataaagacacggctggagcaggagatcgctacttaccgcagcctgctcgagggccaggatgccaagatggctggcattggcatcagggaagcctcttcaggaggtggtggtagcagcagcaatttccacatcaatgtagaagagtcagtggatggacaggtggtttcttcccacaagagagaaatctaagtgtctattgcaggagaaacgtcccttgccactccccactctcatcaggccaagtggaggactggccagagggcctgcacatgcaaactccagtccctgccttcagagagctgaaaagggtccctcggtcttttatttcagggctttgcatgcgctctattccccctctgcctctccccaccttctttggagcaaggagatgcagctgtattgtgtaacaagctcatttgtacagtgtctgttcatgtaataaagaattacttttccttttgcaaat

SEQ ID NO: 240 - protein, 456 aa, Homo sapiens
MTTTFLQTSSSTFGGGSTRGGSLLAGGGGFGGGSLSGGGGSRSISASSARFVSSGSGGGYGGGMRVCGFGGGAGSVFGGGFGGGVGGGFGGGFGGGDGGLLSGNEKITMQNLNDRLASYLDKVRALEEANADLEVKIHDWYQKQTPTSPECDYSQYFKTIEELRDKIMATTIDNSRVILEIDNARLAADDFRLKYENELALRQGVEADINGLRRVLDELTLARTDLEMQIEGLNEELAYLKKNHEEEMKEFSSQLAGQVNVEMDAAPGVDLTRVLAEMREQYEAMAEKNRRDVEAWFFSKTEELNKEVASNTEMIQTSKTEITDLRRTMQELEIELQSQLSMKAGLENSLAETECRYATQLQQIQGLIGGLEAQLSELRCEMEAQNQEYKMLLDIKTRLEQEIATYRSLLEGQDAKMAGIGIREASSGGGGSSSNFHINVEESVDGQVVSSHKREI

SEQ ID NO: 241 - DNA, 8097 bp, Homo sapiens
atttcctataaatatcacaaatatttccaacaaaagagcatagatgtcttttatacaattcttttgagaatgattctgcagatttctgcattttctcctcattaatttgacctgggatggttttcactgaggaaaaaaatctttaagcaaacatgttaaatgtttacctatataaaaattattacttcaggtgactccgataatataacgcatgtgtggaatgaggatgatggacagaccttatctccaagcagtctggctgcacagctcctaattctggaaaactttgaagatgccctcttaaatatatcagcaaatagtccttatattccttacttggcatgtgtgagaaatgtgactgacagtttggccagaggttcaccagaaaatctaagactcctgcagtccacaatacgatttaaaaaatcttttcttcgcaatggttcctatgaagattactttcctccagttcctgaagtcctaaaatcaaaactgtctcaacttcgaaacttgaccgaacttctttgtgaatctgaaactttcagtttgatagagaagtcatgccagctctctgatatgagctttgggagcctgtgtgaagaaagtgagtttgatctgcaactcctcgaagcggcagagctgggcaccgaaatagcagccagcttactgtaccatgacaatgtcatatctaaaaaagtgagagatttgctgactggagatccaagcaaaattaatttaaatatggatcagtttctagaacaggcactgcaaatgaattacttggaaaatatcactcagttaataccgatcatagaagccatgctgcatgtcaataacagtgcagatgcttctgaaaagccaggtcagttactagaaatgtttaaaaatgttgaagagctgaaagaagatttaaggagaacaacaggaatgtccaacaggactattgacaagttgctggccattcccatccctgataatagagctgagattatttctcaggtgttctggctgcattcctgtgatactaatatcaccactcccaaactagaagatgcaatgaaagaattctgcaacctgtctctttcagagagatcccggcagtcttacctcatcggactcacccttctgcactacttaaacatttacaacttcacatacaaggtgtttttcccgaggaaagatcaaaagccagtagaaaagatgatggagctcttcataagactaaaagagattctcaatcagatggcttctggcacacatccgctgctagacaaaatgagatccctgaagcaaatgcatctgcccagaagtgttccattaacacaggcaatgtacagaagcaaccgaatgaacacaccacaaggatcatttagcaccatctcccaagcattatgttctcaaggaattaccactgaatatttaactgccatgctgccctcttcccagaggccaaaaggcaaccacaccaaggattttttgacttataaattaactaaagagcaaattgcttcaaaatatggaattcccataaattccacaccattttgcttctccctttataaagacatcattaacatgcccgctggacctgtgatttgggctttcttgaaacctatgttgttgggaagaattttgtatgcaccatataacccagtcacaaaggcaataatggaaaagtccaatgtaactctgagacagctggcggaattaagagaaaaatctcaagagtggatggataagtcgccacttttcatgaattccttccatctgttaaaccaggcaattccaatgctccagaatactctaaggaacccttttgtgcaagtttttgtaaagttctccgtgggactcgatgctgttgaactattgaaacagatagatgaactcgatattctaagactgaaattagagaacaacattgacatcatcgatcagcttaacacactatcttccctgacagtaaatatttcctcttgtgtattatatgaccgtattcaggcagcaaaaaccatagatgaaatggagagagaggctaaaaggctctacaaaagcaacgaactctttggaagtgttatttttaagcttccttctaacagaagctggcacagaggctatgactctggaaatgtctttcttcctcctgtcataaaatataccatccggatgagtctcaagaccgcacagaccacaagaagcctaagaaccaagatttgggctccagggccacacaattctccatcacacaaccagatctatggcagggcttttatttatttacaggatagtattgaaagagcaatcattgaattgcaaactggaaggaactcccaggaaatagcagtccaggttcaagcaattccttatccctgcttcatgaaagacaacttcctaaccagtgtctcttattctcttccaattgtgcttatggttgcctgggttgtatttatagctgcctttgtaaaaaagcttgtctatgagaaagacctccggcttcatgagtacatgaagatgatgggtgtgaactcctgcagccatttctttgcctggcttatagagagtgttggatttttactggttaccatcgtgatcctcatcattatactcaagtttggcaatattcttcctaaaacaaatgggttcattttgttcctgtatttttcggactacagcttctcggttattgccatgagctatcttatcagtgtcttcttcaacaacaccaacattgcagctctgatcggaagcctcatctacatcattgccttctttccatttattgttctggttacagtggagaatgagttgagctatgtattgaaagtgttcatgagcctgctgtccccaacagcattcagctatgcaagccaatacattgcacgatacgaagaacagggcattggtcttcagtgggaaaatatgtacacctccccggttcaggatgacaccacctcatttggctggctgtgctgtctaatcctagctgactctttcatttatttccttattgcttggtatgtcaggaatgtcttcccagggacatacggtatggcagctccctggtattttccaattcttccttcctattggaaggagcgatttgggtgtgcagaggtgaagcctgagaagagcaatggcctcatgtttactaacatcatgatgcagaacaccaacccatctgccagtcctgaatacatgttttcctctaacatcgagcctgaacctaaagatctcacagtcggggttgccctgcatggggtcacaaagatctatggctcaaaagttgctgttgataacctcaatctgaacttttatgaagggcatattacttcattgctggggcccaatggagctgggaaaactactaccatttccatgttaactgggctgtttggggcctcagcaggcaccatttttgtatatggaaaagatatcaaaacagacctacacacggtacggaagaacatgggagtctgtatgcagcacgacgtcttgttcagttacctcactactaaggagcaccttctcctatatggttccatcaaagttcctcactggactaaaaagcagctccacgaggaagtaaaaaggactttaaaagatactggactatatagccatcgtcataagagagttggaacactgtcaggaggcatgaagaggaagttatctatatccatagctctcattggtggatcaagggtagtaattttggatgaaccatctactggagttgacccatgttctcgccgaagtatatgggatgttatatccaagaacaaaactgccagaacaatcattctgtcaacgcaccacttggacgaggctgaagtgctgagtgaccgcatcgccttcctggagcagggtgggcttaggtgctgtgggtccccattttacctcaaggaagcctttggcgatgggtatcacctcacgcttaccaagaagaagagtccaaatttaaatgcaaatgcagtatgtgacaccatggccgtgacagcaatgatccaatcacatctccccgaagcctacctcaaggaggatattgggggagagcttgtttatgtacttcctccattcagcaccaaagtctcaggggcctacctgtcactcctacgggcactcgacaatggcatgggtgacctcaacatcgggtgctacggcatttcagataccaccgtggaggaggtctttctgaacttgaccaaagagtcacaaaaaaatagtgctatgagtcttgagcacttaacacaaaagaaaattgggaattccaatgccaatggcatctcaactcctgacgatttatctgtgagcagcagcaatttcacagacagagatgacaaaatcctgacaagaggagagaggctggatggctttggactgttgctgaagaagatcatggctatactcatcaagaggttccaccacacccgcaggaactggaaaggtctcattgctcaggttatcctccccatcgtctttgttaccactgccatgggccttggcacactgagaaattccagcaacagttatccagagattcagatctccccctctctttatggtacctccgaacagacagccttctatgctaattatcacccgagcacggaagcacttgtctcagcaatgtgggacttccctggaattgacaacatgtgtctgaacaccagtgatctacagtgtttaaacaaagacagtctggaaaaatggaacaccagtggagaacccatcactaattttggtgtttgctcctgctcagaaaatgtccaggaatgtcctaaatttaactattccccaccgcacagaagaacttactcatcccaggtaatttataacctcactgggcaacgagtggaaaattatcttatatcaactgcaaatgagtttgtccaaaaaagatatggaggttggagttttgggctgcctttgacaaaagaccttcgttttgatataacaggagtccctgccaatagaacacttgccaaggtatggtatgatccagaaggctatcactcccttccagcttacctcaacagcctgaataatttccttctgcgagttaacatgtcaaaatacgatgctgcccgacatggcatcatcatgtatagccatccttatccaggagtgcaagaccaagaacaagccacaatcagcagtttaatcgatattttagtggcactgtctatcttgatgggctactctgtcaccaccgccagctttgtcacctatgttgtaagggaacatcaaaccaaagccaaacagttgcagcacatttcaggcattggcgtgacatgctactgggtaacaaacttcatttatgacatggttttctacttggtgcctgtagcgttttcaattggtatcattgcgattttcaaattacctgcattctacagtgaaaacaacctaggcgctgtatctctcctacttctcctgtttgggtatgcaacattttcctggatgtacttgctggctgggctcttccatgaaacaggaatggccttcatcacttacgtctgtgtcaacttgttttttggcattaattccattgtttccctgtcagtggtatactttctttccaaggaaaagcctaatgatccgactttagaacttatttctgaaaccctcaagcgcattttcctgattttcccacaattctgttttggctacggtttgattgaactttctcaacaacagtcggtcctagacttcttaaaagcatatggagtggaatacccaaatgaaacctttgagatgaataaactaggtgcaatgtttgtggctttggtttctcagggcaccatgtttttttccttgcgactcttaatcaacgaatccctgataaagaaactcaggcttttcttcagaaaatttaattcttcacatgtaagggagacaatagatgaggatgaagatgtgcgggctgagagattaagagttgagagtggtgcagctgaatttgacttggtccaactttattgtctcacaaagacctaccaacttatccacaaaaagattatagctgtaaacaacatcagcattgggatacctgctggagagtgttttgggcttcttggagtgaatggagcaggaaagaccactatattcaagatgctgacaggagacatcattccttcaagtggaaacattctgatcagaaataagaccggatctctgggtcacgttgattctcacagctcattagttggctactgtcctcaggaagatgccttagatgacctggtaactgtggaagaacatttgtatttctatgccagggtacatggaattccagaaaaggatattaaagaaactgttcataaactccttaggagacttcacctgatgcccttcaaggacagagctacctctatgtgcagttatggcacaaaaagaaaattatccactgcactggccttgatagggaaaccttccattctactgctggatgagccgagctctggcatggatccgaagtcgaaacggcacctctggaagatcatttcagaagaagtacagaacaaatgttccgtcatcctcacatctcacagcatggaagaatgtgaagctctctgtaccaggttggccattatggtgaatggaaagtttcaatgtattggatctttgcagcacataaagagcaggtttggacgaggatttactgtcaaagttcacttgaagaataacaaagtgaccatggagaccctcacaaagttcatgcagctgcactttccaaaaacatacttaaaagatcagcacctcagcatgctagagtatcatgtaccagtcacagcaggaggagtcgcaaacatttttgatctgctggaaaccaacaagactgctttaaatattacaaatttcttagtgagtcagaccactctggaagaggttttcatcaactttgccaaagaccagaagtcctatgaaactgctgataccagcagccaaggttccactataagtgttgactcacaagatgaccagatggagtcttaacacttccagcaaactcaatctcagcgtgtgaccaatggcttcattttgaagaaaagccacagaagatacacttccgcaagatatcttcattttaaagtaaagtaatatactgtatggaaagttacaactgtgttagactaacaagtaattataaaaggaaatttttccttctaaggtcagtgagtgttgttgctactgaaatgaattcctgtatactcaacactgtgagcatgctaatgtatatgctggtgattcttatgcaaaggtgaagccacctcaagatgaatatcttaatttattactttcaataaaaagacagtttaaaaggcatggattttggtagttgaaatataagagtggagaagaaaagtcagatggtttgtggcaggtgccaccgggcaagcagacaacataatttatttccagaaaacaacagaatgaacatcatcatgaatacatgaatcggctgtgatgtgtgaactgctaagggccaaatgaacgtttgcagagcagtgggcacaatgtttacaatgtatgtgtatgtcactttcggtacctgtgaatgcatggggacgtgctgaacccgaaaaaaagtgcctttccataaggactgcaatagagagggcaatttaccctggtggtacacggaacctagattcactcctgccatgccttgccaatagtaagctgcagggtggaacaagaaatcacttgctctggggggaagggaggggggaatgggtgtgtcagctgggtagatacaaaccctgaaaagagaatccatgtgctactggcaggcaacattttttaaagctctttcagaaaccctcatatttggggtttcttttcaggaaacattcctgtggagggaaaacgaatatgaagataattttcagctaattatctgggtgacccagaatcgtgtatatggctataggatagacttcttaataatggcaagtgacgtggccctggggaaaggtgctttatgtaccgtgtgtgcgtgtatgtgtgtgtatctatacaagtttgtcagctttggcatgactgtttgtctcgaaaaccaataaactcaaagtttagaaaaactcaaaaaaaaaaaaa

SEQ ID NO: 242 - protein, 2277 aa, Homo sapiens
MFTYIKIITSGDSDNITHVWNEDDGQTLSPSSLAAQLLILENFEDALLNISANSPYIPYLACVRNVTDSLARGSPENLRLLQSTIRFKKSFLRNGSYEDYFPPVPEVLKSKLSQLRNLTELLCESETFSLIEKSCQLSDMSFGSLCEESEFDLQLLEAAELGTEIAASLLYHDNVISKKVRDLLTGDPSKINLNMDQFLEQALQMNYLENITQLIPIIEAMLHVNNSADASEKPGQLLEMFKNVEELKEDLRRTTGMSNRTIDKLLAIPIPDNRAEIISQVFWLHSCDTNITTPKLEDAMKEFCNLSLSERSRQSYLIGLTLLHYLNIYNFTYKVFFPRKDQKPVEKMMELFIRLKEILNQMASGTHPLLDKMRSLKQMHLPRSVPLTQAMYRSNRMNTPQGSFSTISQALCSQGITTEYLTAMLPSSQRPKGNHTKDFLTYKLTKEQIASKYGIPINSTPFCFSLYKDIINMPAGPVIWAFLKPMLLGRILYAPYNPVTKAIMEKSNVTLRQLAELREKSQEWMDKSPLFMNSFHLLNQAIPMLQNTLRNPFVQVFVKFSVGLDAVELLKQIDELDILRLKLENNIDIIDQLNTLSSLTVNISSCVLYDRIQAAKTIDEMEREAKRLYKSNELFGSVIFKLPSNRSWHRGYDSGNVFLPPVIKYTIRMSLKTAQTTRSLRTKIWAPGPHNSPSHNQIYGRAFIYLQDSIERAIIELQTGRNSQEIAVQVQAIPYPCFMKDNFLTSVSYSLPIVLMVAWVVFIAAFVKKLVYEKDLRLHEYMKMMGVNSCSHFFAWLIESVGFLLVTIVILIIILKFGNILPKTNGFILFLYFSDYSFSVIAMSYLISVFFNNTNIAALIGSLIYIIAFFPFIVLVTVENELSYVLKVFMSLLSPTAFSYASQYIARYEEQGIGLQWENMYTSPVQDDTTSFGWLCCLILADSFIYFLIAWYVRNVFPGTYGMAAPWYFPILPSYWKERFGCAEVKPEKSNGLMFTNIMMQNTNPSASPEYMFSSNIEPEPKDLTVGVALHGVTKIYGSKVAVDNLNLNFYEGHITSLLGPNGAGKTTTISMLTGLFGASAGTIFVYGKDIKTDLHTVRKNMGVCMQHDVLFSYLTTKEHLLLYGSIKVPHWTKKQLHEEVKRTLKDTGLYSHRHKRVGTLSGGMKRKLSISIALIGGSRVVILDEPSTGVDPCSRRSIWDVISKNKTARTIILSTHHLDEAEVLSDRIAFLEQGGLRCCGSPFYLKEAFGDGYHLTLTKKKSPNLNANAVCDTMAVTAMIQSHLPEAYLKEDIGGELVYVLPPFSTKVSGAYLSLLRALDNGMGDLNIGCYGISDTTVEEVFLNLTKESQKNSAMSLEHLTQKKIGNSNANGISTPDDLSVSSSNFTDRDDKILTRGERLDGFGLLLKKIMAILIKRFHHTRRNWKGLIAQVILPIVFVTTAMGLGTLRNSSNSYPEIQISPSLYGTSEQTAFYANYHPSTEALVSAMWDFPGIDNMCLNTSDLQCLNKDSLEKWNTSGEPITNFGVCSCSENVQECPKFNYSPPHRRTYSSQVIYNLTGQRVENYLISTANEFVQKRYGGWSFGLPLTKDLRFDITGVPANRTLAKVWYDPEGYHSLPAYLNSLNNFLLRVNMSKYDAARHGIIMYSHPYPGVQDQEQATISSLIDILVALSILMGYSVTTASFVTYVVREHQTKAKQLQHISGIGVTCYWVTNFIYDMVFYLVPVAFSIGIIAIFKLPAFYSENNLGAVSLLLLLFGYATFSWMYLLAGLFHETGMAFITYVCVNLFFGINSIVSLSVVYFLSKEKPNDPTLELISETLKRIFLIFPQFCFGYGLIELSQQQSVLDFLKAYGVEYPNETFEMNKLGAMFVALVSQGTMFFSLRLLINESLIKKLRLFFRKFNSSHVRETIDEDEDVRAERLRVESGAAEFDLVQLYCLTKTYQLIHKKIIAVNNISIGIPAGECFGLLGVNGAGKTTIFKMLTGDIIPSSGNILIRNKTGSLGHVDSHSSLVGYCPQEDALDDLVTVEEHLYFYARVHGIPEKDIKETVHKLLRRLHLMPFKDRATSMCSYGTKRKLSTALALIGKPSILLLDEPSSGMDPKSKRHLWKIISEEVQNKCSVILTSHSMEECEALCTRLAIMVNGKFQCIGSLQHIKSRFGRGFTVKVHLKNNKVTMETLTKFMQLHFPKTYLKDQHLSMLEYHVPVTAGGVANIFDLLETNKTALNITNFLVSQTTLEEVFINFAKDQKSYETADTSSQGSTISVDSQDDQMES

SEQ ID NO: 243 - DNA, 4446 bp, Homo sapiens
tgccttgaccaggacttgggactttgcgaaaggatcgcggggcccggagaggtgttggagagcacaatggctgaacaagtccttcctcaggctttgtatttgagcaatatgcggaaagctgtgaagatacgggagagaactccagaagacatttttaaacctactaatgggatcattcatcattttaaaaccatgcaccgatacacactggaaatgttcagaacttgccagttttgtcctcagtttcgggagatcatccacaaagccctcatcgacagaaacatccaggccaccctggaaagccagaagaaactcaactggtgtcgagaagtccggaagcttgtggcgctgaaaacgaacggtgacggcaattgcctcatgcatgccacttctcagtacatgtggggcgttcaggacacagacttggtactgaggaaggcgctgttcagcacgctcaaggaaacagacacacgcaactttaaattccgctggcaactggagtctctcaaatctcaggaatttgttgaaacggggctttgctatgatactcggaactggaatgatgaatgggacaatcttatcaaaatggcttccacagacacacccatggcccgaagtggacttcagtacaactcactggaagaaatacacatatttgtcctttgcaacatcctcagaaggccaatcattgtcatttcagacaaaatgctaagaagtttggaatcaggttccaatttcgcccctttgaaagtgggtggaatttacttgcctctccactggcctgcccaggaatgctacagataccccattgttctcggctatgacagccatcattttgtacccttggtgaccctgaaggacagtgggcctgaaatccgagctgttccacttgttaacagagaccggggaagatttgaagacttaaaagttcactttttgacagatcctgaaaatgagatgaaggagaagctcttaaaagagtacttaatggtgatagaaatccccgtccaaggctgggaccatggcacaactcatctcatcaatgccgcaaagttggatgaagctaacttaccaaaagaaatcaatctggtagatgattactttgaacttgttcagcatgagtacaagaaatggcaggaaaacagcgagcaggggaggagagaggggcacgcccagaatcccatggaaccttccgtgccccagctttctctcatggatgtaaaatgtgaaacgcccaactgccccttcttcatgtctgtgaacacccagcctttatgccatgagtgctcagagaggcggcaaaagaatcaaaacaaactcccaaagctgaactccaagccgggccctgaggggctccctggcatggcgctcggggcctctcggggagaagcctatgagcccttggcgtggaaccctgaggagtccactggggggcctcattcggccccaccgacagcacccagcccttttctgttcagtgagaccactgccatgaagtgcaggagccccggctgccccttcacactgaatgtgcagcacaacggattttgtgaacgttgccacaacgcccggcaacttcacgccagccacgccccagaccacacaaggcacttggatcccgggaagtgccaagcctgcctccaggatgttaccaggacatttaatgggatctgcagtacttgcttcaaaaggactacagcagaggcctcctccagcctcagcaccagcctccctccttcctgtcaccagcgttccaagtcagatccctcgcggctcgtccggagcccctccccgcattcttgccacagagctggaaacgacgcccctgctggctgcctgtctcaagctgcacggactcctggggacaggacggggacgagcaagtgcagaaaagccggctgcgtgtattttgggactccagaaaacaagggcttttgcacactgtgtttcatcgagtacagagaaaacaaacattttgctgctgcctcagggaaagtcagtcccacagcgtccaggttccagaacaccattccgtgcctggggagggaatgcggcacccttggaagcaccatgtttgaaggatactgccagaagtgtttcattgaagctcagaatcagagatttcatgaggccaaaaggacagaagagcaactgagatcgagccagcgcagagatgtgcctcgaaccacacaaagcacctcaaggcccaagtgcgcccgggcctcctgcaagaacatcctggcctgccgcagcgaggagctctgcatggagtgtcagcatcccaaccagaggatgggccctggggcccaccggggtgagcctgcccccgaagacccccccaagcagcgttgccgggcccccgcctgtgatcattttggcaatgccaagtgcaacggctactgcaacgaatgctttcagttcaagcagatgtatggctaaccggaaacaggtgggtcacctcctgcaagaagtggggcctcgagctgtcagtcatcatggtgctatcctctgaacccctcagctgccactgcaacagtgggcttaagggtgtctgagcaggagaggaaagataagctcttcgtggtgcccacgatgctcaggtttggtaacccgggagtgttcccaggtggccttagaaagcaaagcttgtaactggcaagggatgatgtcagattcagcccaaggttcctcctctcctaccaagcaggaggccaggaacttctttggacttggaaggtgtgcggggactggccgaggcccctgcaccctgcgcatcaggactgcttcatcgtcttggctgagaaagggaaaagacacacaagtcgcgtgggttggagaagccagagccattccacctcccctcccccagcatctctcagagatgtgaagccagatcctcatggcagcgaggccctctgcaagaagctcaaggaagctcagggaaaatggacgtattcagagagtgtttgtagttcatggtttttccctacctgcccggttcctttcctgaggacccggcagaaatgcagaaccatccatggactgtgattctgaggctgctgagactgaacatgttcacattgacagaaaaacaagctgctctttataatatgcaccttttaaaaaattagaatattttactgggaagacgtgtaactctttgggttattactgtctttacttctaaagaagttagcttgaactgaggagtaaaagtgtgtacatatataatatacccttacattatgtatgagggatttttttaaattatattgaaatgctgccctagaagtacaataggaaggctaaataataataacctgttttctggttgttgttggggcatgagcttgtgtatacactgcttgcataaactcaaccagctgcctttttaaagggagctctagtcctttttgtgtaattcactttatttattttattacaaacttcaagattatttaagtgaagatatttcttcagctctggggaaaatgccacagtgttctcctgagagaacatccttgctttgagtcaggctgtgggcaagttcctgaccacagggagtaaattggcctctttgatacacttttgcttgcctccccaggaaagaaggaattgcatccaaggtatacatacatattcatcgatgtttcgtgcttctccttatgaaactccagctatgtaataaaaaactatactctgtgttctgttaatgcctctgagtgtcctacctccttggagatgagatagggaaggagcagggatgagactggcaatggtcacagggaaagatgtggccttttgtgatggttttattttctgttaacactgtgtcctgggggggctgggaagtcccctgcatcccatggtaccctggtattgggacagcaaaagccagtaaccatgagtatgaggaaatctctttctgttgctggcttacagtttctctgtgtgctttgtggttgctgtcatatttgctctagaagaaaaaaaaaaaaggaggggaaatgcattttccccagagataaaggctgccattttgggggtctgtacttatggcctgaaaatatttgtgatccataactctacacagcctttactcatactattaggcacactttccccttagagccccctaagtttttcccagacgaatctttataatttctttccaaagataccaaataaacttcagtgttttcatctaattctcttaaagttgatatcttaatattttgtgttgatcattatttccattcttaatgtgaaaaaaagtaattatttatacttattataaaaagtatttgaaatttgcacatttaattgtccctaatagaaagccacctattctttgttggatttcttcaagtttttctaaataaatgtaacttttcacaagagtcaacattaaaaaataaattatttaagaacaaaaaaaaaaaaaaa

SEQ ID NO: 244 - protein, 790 aa, Homo sapiens
MAEQVLPQALYLSNMRKAVKIRERTPEDIFKPTNGIIHHFKTMHRYTLEMFRTCQFCPQFREIIHKALIDRNIQATLESQKKLNWCREVRKLVALKTNGDGNCLMHATSQYMWGVQDTDLVLRKALFSTLKETDTRNFKFRWQLESLKSQEFVETGLCYDTRNWNDEWDNLIKMASTDTPMARSGLQYNSLEEIHIFVLCNILRRPIIVISDKMLRSLESGSNFAPLKVGGIYLPLHWPAQECYRYPIVLGYDSHHFVPLVTLKDSGPEIRAVPLVNRDRGRFEDLKVHFLTDPENEMKEKLLKEYLMVIEIPVQGWDHGTTHLINAAKLDEANLPKEINLVDDYFELVQHEYKKWQENSEQGRREGHAQNPMEPSVPQLSLMDVKCETPNCPFFMSVNTQPLCHECSERRQKNQNKLPKLNSKPGPEGLPGMALGASRGEAYEPLAWNPEESTGGPHSAPPTAPSPFLFSETTAMKCRSPGCPFTLNVQHNGFCERCHNARQLHASHAPDHTRHLDPGKCQACLQDVTRTFNGICSTCFKRTTAEASSSLSTSLPPSCHQRSKSDPSRLVRSPSPHSCHRAGNDAPAGCLSQAARTPGDRTGTSKCRKAGCVYFGTPENKGFCTLCFIEYRENKHFAAASGKVSPTASRFQNTIPCLGRECGTLGSTMFEGYCQKCFIEAQNQRFHEAKRTEEQLRSSQRRDVPRTTQSTSRPKCARASCKNILACRSEELCMECQHPNQRMGPGAHRGEPAPEDPPKQRCRAPACDHFGNAKCNGYCNECFQFKQMYG

SEQ ID NO: 245 - DNA, 2076 bp, Homo sapiens
cggggaaggggagggaggagggggacgagggctctggcgggtttggaggggctgaacatcgcggggtgttctggtgtcccccgccccgcctctccaaaaagctacaccgacgcggaccgcggcggcgtcctccctcgccctcgcttcacctcgcgggctccgaatgcggggagctcggatgtccggtttcctgtgaggcttttacctgacacccgccgcctttccccggcactggctgggagggcgccctgcaaagttgggaacgcggagccccggacccgctcccgccgcctccggctcgcccagggggggtcgccgggaggagcccgggggagagggaccaggaggggcccgcggcctcgcaggggcgcccgcgcccccacccctgcccccgccagcggaccggtcccccacccccggtccttccaccatgcacttgctgggcttcttctctgtggcgtgttctctgctcgccgctgcgctgctcccgggtcctcgcgaggcgcccgccgccgccgccgccttcgagtccggactcgacctctcggacgcggagcccgacgcgggcgaggccacggcttatgcaagcaaagatctggaggagcagttacggtctgtgtccagtgtagatgaactcatgactgtactctacccagaatattggaaaatgtacaagtgtcagctaaggaaaggaggctggcaacataacagagaacaggccaacctcaactcaaggacagaagagactataaaatttgctgcagcacattataatacagagatcttgaaaagtattgataatgagtggagaaagactcaatgcatgccacgggaggtgtgtatagatgtggggaaggagtttggagtcgcgacaaacaccttctttaaacctccatgtgtgtccgtctacagatgtgggggttgctgcaatagtgaggggctgcagtgcatgaacaccagcacgagctacctcagcaagacgttatttgaaattacagtgcctctctctcaaggccccaaaccagtaacaatcagttttgccaatcacacttcctgccgatgcatgtctaaactggatgtttacagacaagttcattccattattagacgttccctgccagcaacactaccacagtgtcaggcagcgaacaagacctgccccaccaattacatgtggaataatcacatctgcagatgcctggctcaggaagattttatgttttcctcggatgctggagatgactcaacagatggattccatgacatctgtggaccaaacaaggagctggatgaagagacctgtcagtgtgtctgcagagcggggcttcggcctgccagctgtggaccccacaaagaactagacagaaactcatgccagtgtgtctgtaaaaacaaactcttccccagccaatgtggggccaaccgagaatttgatgaaaacacatgccagtgtgtatgtaaaagaacctgccccagaaatcaacccctaaatcctggaaaatgtgcctgtgaatgtacagaaagtccacagaaatgcttgttaaaaggaaagaagttccaccaccaaacatgcagctgttacagacggccatgtacgaaccgccagaaggcttgtgagccaggattttcatatagtgaagaagtgtgtcgttgtgtcccttcatattggaaaagaccacaaatgagctaagattgtactgttttccagttcatcgattttctattatggaaaactgtgttgccacagtagaactgtctgtgaacagagagacccttgtgggtccatgctaacaaagacaaaagtctgtctttcctgaaccatgtggataactttacagaaatggactggagctcatctgcaaaaggcctcttgtaaagactggttttctgccaatgaccaaacagccaagattttcctcttgtgatttctttaaaagaatgactatataatttatttccactaaaaatattgtttctgcattcatttttatagcaacaacaattggtaaaactcactgtgatcaatatttttatatcatgcaaaatatgtttaaaataaaatgaaaattgtattat

SEQ ID NO: 246 - protein, 419 aa, Homo sapiens
MHLLGFFSVACSLLAAALLPGPREAPAAAAAFESGLDLSDAEPDAGEATAYASKDLEEQLRSVSSVDELMTVLYPEYWKMYKCQLRKGGWQHNREQANLNSRTEETIKFAAAHYNTEILKSIDNEWRKTQCMPREVCIDVGKEFGVATNTFFKPPCVSVYRCGGCCNSEGLQCMNTSTSYLSKTLFEITVPLSQGPKPVTISFANHTSCRCMSKLDVYRQVHSIIRRSLPATLPQCQAANKTCPTNYMWNNHICRCLAQEDFMFSSDAGDDSTDGFHDICGPNKELDEETCQCVCRAGLRPASCGPHKELDRNSCQCVCKNKLFPSQCGANREFDENTCQCVCKRTCPRNQPLNPGKCACECTESPQKCLLKGKKFHHQTCSCYRRPCTNRQKACEPGFSYSEEVCRCVPSYWKRPQMS

SEQ ID NO: 247 - DNA, 1699 bp, Homo sapiens
ggccctccctggaggagaactgaaacttagggtggggactgtagaaaggggcggagagatcagccgcccagccaggagttaagctgaggtcgtctgagccctgcgacagcctggacagcaactcaggatggcatcaggcagggcacgctgcacccgaaaactccggaactgggtggtggagcaagtggagagtgggcagtttcccggagtgtgctgggatgatacagctaagaccatgttccggattccctggaaacatgcaggcaagcaggacttccgggaggaccaggatgctgccttcttcaaggcctgggcaatatttaagggaaagtataaggagggggacacaggaggtccagctgtctggaagactcgcctgcgctgtgcactcaacaagagttctgaatttaaggaggttcctgagaggggccgcatggatgttgctgagccctacaaggtgtatcagttgctgccaccaggaatcgtctctggccagccagggactcagaaagtaccatcaaagcgacagcacagttctgtgtcctctgagaggaaggaggaagaggatgccatgcagaactgcacactcagtccctctgtgctccaggactccctcaataatgaggaggagggggccagtgggggagcagtccattcagacattgggagcagcagcagcagcagcagccctgagccacaggaagttacagacacaactgaggccccctttcaaggggatcagaggtccctggagtttctgcttcctccagagccagactactcactgctgctcaccttcatctacaacgggcgcgtggtgggcgaggcccaggtgcaaagcctggattgccgccttgtggctgagccctcaggctctgagagcagcatggagcaggtgctgttccccaagcctggcccactggagcccacgcagcgcctgctgagccagcttgagaggggcatcctagtggccagcaacccccgaggcctcttcgtgcagcgcctttgccccatccccatctcctggaatgcaccccaggctccacctgggccaggcccgcatctgctgcccagcaacgagtgcgtggagctcttcagaaccgcctacttctgcagagacttggtcaggtactttcagggcctgggccccccaccgaagttccaggtaacactgaatttctgggaagagagccatggctccagccatactccacagaatcttatcacagtgaagatggagcaggcctttgcccgatacttgctggagcagactccagagcagcaggcagccattctgtccctggtgtagagcctgggggacccatcttccacctcacctctttgttcttcctgtctcctttgaagtagactcattcttcacacgattgacctgtcctctttgtgataattctcagtagttgtccgtgataatcgtgtcctgaaaatcctcgcacacactggctggtggagaactcaaggctaattttttatccttttttttttttaattttgagatatacgccctctttcatctgtaagggactaggaaattccaaatggtgtgaacccagggggcctttccctcttccctgacctcccaactctaaagccaagcactttatattttcctcttagatattcactaaggacttaaaataaaattttattgaaagaggaaaaaaaaaaaaaaaaaaaaaaa

SEQ ID NO: 248 - protein, 393 aa, Homo sapiens
MASGRARCTRKLRNWVVEQVESGQFPGVCWDDTAKTMFRIPWKHAGKQDFREDQDAAFFKAWAIFKGKYKEGDTGGPAVWKTRLRCALNKSSEFKEVPERGRMDVAEPYKVYQLLPPGIVSGQPGTQKVPSKRQHSSVSSERKEEEDAMQNCTLSPSVLQDSLNNEEEGASGGAVHSDIGSSSSSSSPEPQEVTDTTEAPFQGDQRSLEFLLPPEPDYSLLLTFIYNGRVVGEAQVQSLDCRLVAEPSGSESSMEQVLFPKPGPLEPTQRLLSQLERGILVASNPRGLFVQRLCPIPISWNAPQAPPGPGPHLLPSNECVELFRTAYFCRDLVRYFQGLGPPPKFQVTLNFWEESHGSSHTPQNLITVKMEQAFARYLLEQTPEQQAAILSLV

SEQ ID NO: 249 - DNA, 3998 bp, Homo sapiens
ccgggagcccgggcgccctggagtgaggaggaccgggagctggctctggaggctgcggaggcgacgccggagagaacgaagcctcggctgggagcggatctttcgaagatggtttggctgccttggagatttggagatctgatgccacgatgaggactcacacacggggggctcccagtgtgtttttcatatatttgctttgctttgtgtcagcctacatcaccgacgagaacccagaagttatgattcccttcaccaatgccaactacgacagccatcccatgctgtacttctccagggcagaagtggcggagctgcagctcagggctgccagctcgcacgagcacattgcagcccgcctcacggaggctgtgcacacgatgctgtccagccccttggaatacctccctccctgggatcccaaggactacagtgcccgctggaatgaaatttttggaaacaacttgggtgccttggcaatgttctgtgtgctgtatcctgagaacattgaagcccgagacatggccaaagactacatggagaggatggcagcgcagcctagttggttggtgaaagatgctccttgggatgaggtcccgcttgctcactccctggttggttttgccactgcttatgacttcttgtacaactacctgagcaagacacaacaggagaagtttcttgaagtgattgccaatgcctcagggtatatgtatgaaacttcatacaggagaggatggggatttcaatacctgcacaatcatcagcccaccaactgtatggctttgctcacgggaagcctagtcctgatgaatcaaggatatcttcaagaagcctacttatggaccaaacaagttctgaccatcatggagaaatctctggtcttgctcagggaggtgacggatggctccctctatgaaggagttgcgtatggcagctacaccactagatcactcttccaatacatgtttctcgtccagaggcacttcaacatcaaccactttggccatccgtggcttaaacaacactttgcatttatgtatagaaccatcctgccagggtttcaaaggactgtggctattgcggactcaaattacaactggttttatggtccagaaagccaattagtgttccttgataaatttgtcatgcgtaatggcagtggtaactggctagctgaccaaatcagaaggaaccgtgtggtggaaggtccaggaacaccatccaaagggcagcgctggtgcactctgcacacagaatttctctggtatgatggcagcttgaaatcggttcctcctccagactttggcacccctacactgcattattttgaagactggggtgtcgtgacttatggaagtgcactacctgcagaaatcaatagatctttcctttccttcaagtctggaaaactggggggacgtgcaatatatgacattgtccacagaaacaaatacaaagattggatcaaaggatggagaaattttaatgcagggcatgaacatcctgatcaaaactcatttacttttgctcccaatggtgtgcctttcattactgaggctctgtacgggccaaagtacaccttcttcaacaatgttttgatgttttccccagctgtgtcaaagagctgcttttctccctgggtgggtcaggtcacagaagactgctcatcaaaatggtctaaatacaagcatgacctggcagctagttgtcaggggagggtggttgcagcagaggagaaaaatggggtggttttcatccgaggagaaggtgtgggagcttataacccccagctcaacctgaagaatgttcagaggaatctcatcctcctacatccacagctgcttctccttgtagaccaaatacacctgggagaggagagtcccttggagacagcagcgagcttcttccataatgtggatgttccttttgaggagactgtggtagatggtgtccatggggctttcatcaggcagagagatggtctctataaaatgtactggatggacgatactggctacagcgagaaagcaacctttgcctcagtgacatatcctcggggctatccctacaacgggacaaactatgtgaatgtcaccatgcacctccgaagtcccatcaccagggcagcttacctcttcatagggccatctatagatgttcagagcttcactgtccacggagactctcagcaactggatgtgttcatagccaccagcaaacatgcctacgccacatacctgtggacaggtgaggccacaggacagtctgcctttgcacaggtcattgctgatcgtcacaaaattctgtttgaccggaattcagccatcaagagcagcattgtccctgaggtgaaggactatgctgctattgtggaacagaacttgcagcattttaaaccagtgtttcagctgctggagaagcagatactgtcccgagtccggaacacagctagctttaggaagactgctgaacgcctgctgagattttcagataagagacagactgaggaggccattgacaggatttttgccatatcacagcaacagcagcagcaaagcaagtcaaagaaaaaccgaagggcaggcaaacgctataaatttgtggatgctgtccctgatatttttgcacagattgaagtcaatgagaaaaagattagacagaaagctcagattttggcacagaaagaactacccatagatgaagatgaagaaatgaaagaccttttagattttgcagatgtaacatacgagaaacataaaaatgggggcttgattaaaggccggtttggacaggcacggatggtgacaactacacacagcagggccccatcactgtctgcttcctataccaggttgttcctgattctgaacattgctattttctttgtcatgttggcaatgcaactgacttatttccagagggcccagagcctacatggccaaagatgtctttatgcagttcttctcatagatagctgtattttattatggttgtactcttcttgttcccaatcacagtgttagcactgaagctataaattacctggtcattttgtgatcacaagagtctatgcaaaaaaaaaaatttctttaccccagattatcagatttttttccctcagattcattttaacaaattaagggaagatattttgacacaagaaagcaggaacgtggagaaattggagcaggaaaagaaattatcaaagcaatagaaatagcttggtggtcctatggtgtttttggaagtatttggcattgctaattgagcagtccatatagtactacttttagaagaaacaaaaagtctattttttaaagtaatgttttttcttatgagaaaaaggtttagatagaattgggttttattaatattaatttaatgctattagcaatttccatatactatattgtggaaaagactgaagaatacaattctgagaaatataaaaaaattttaatggtatactcatgttgaaagataaatgttgctaagtcctggtatgatggtgtgagcttccttggggaagtacttcttgagttatgtaactaacaggatgttttactacagatctggatggctattcagataacatggcaaaaaatgatagcagaagatcattaaaaacttaaaatatattttattagaaaacatttatctatgaatgaatatttccttgatgctggtctctgcacacatatgcttggttacttgcatgcattcattggttgttcaataagtgagatgattacagataatactgtattttccttatatggaaaaccgttatagacccaataacaactaaacctttcaaaagaaaatattttctattatgaatgttgattttcataccaaagaagatggagagtctaaaatttggatatgattcttatgtttttttaatagaaaaccttcttcaagtttattttcctaaataaacatcataattgtgaaaaaaaaaaaaaaaaaaaaaaaaaaaaaaaaaaaaaaaa

SEQ ID NO: 250 - protein, 958 aa, Homo sapiens [sequence omitted]

SEQ ID NO: 251 - DNA, 6216 bp, Homo sapiens
gcgggcaaggcgggcggagcgcactggaactcaagggggcgcacagcggcgcgctcgcaccgctcggctccgcgcggctctaggaggtggcggcggtggcggtggcggcggtggcggcggcggcggcggcggggcgcagggctgagcgagcgtccgggttccggggctccggggaaggcggttgcagctcctgagtgcagcgcggcttcctgccactgtcccggcccggccacctctctgtcatggctctggcggacagcacacgtggattacccaacgggggcggcggcgggggcggcagtggctcctcgtcgtcctccgcggagccaccgctcttccccgacatcgtggagctgaacgtggggggccaggtgtacgtgacccggcgctgcacggtggtgtcggtgcccgactcgctgctctggcgcatgttcacgcagcagcagccgcaggagctggcccgggacagcaaaggccgcttctttctggaccgggacggcttcctcttccgctacatcctggattacctgcgggacttgcagctcgtgctgcccgactacttccccgagcgcagccggctgcagcgcgaggccgagtacttcgagctgccagagctcgtgcgccgcctcggggcgccccagcagcccggcccggggccgccgccctcgcggcgcggggtgcacaaggagggctcgctgggtgacgagctgctgccgcttggctactcggagcccgaacagcaggagggcgcctctgccggggcgccgtcgcccacgctggagctggctagccgcagtccgtccgggggcgcggcgggcccgctgctcacgccgtcccagtcgctggacggcagccggcgctcgggctacatcaccatcggctaccgcggctcctacaccatcgggcgggacgcgcaggcggacgccaagttccggcgagtggcgcgcatcaccgtttgcggaaagacgtcgctggccaaggaggtgtttggggacaccctgaacgaaagccgggaccccgaccgtcccccggagcgctacacctcgcgctattacctcaagttcaacttcctggagcaggccttcgacaagctgtccgagtcgggcttccacatggtggcgtgcagctccacgggcacctgcgcctttgccagcagcaccgaccagagcgaggacaagatctggaccagctacaccgagtacgtcttctgcagggagtgagctccccagaccccctcgccactccagcgcccagtccttctcctgcccgagagatgattacagagcctcttgtcccacctttgtcccctggctgctgccctcccattctccccctccagtagtagctgggtgagacctgtccgcccaccttccctccactacagaacctgcagccgcaaatcctctgggctgcttcgtcttctttggacctcctgaaccgagagaacccagaggaacccccaccccacccccacctaccactccatgctttctctactccctgcctcaaaccacccctcccccagatggtacttcagtttggatctattgggggagtgtggccacagaccgggggatgattgaattgttcagaacctgattggaccgtgtccaatgtgcggaagatttccttgaaatcttctcaagctcttatgactcactgggggtttaagagatcaggattggttccactgtctggggttagtgttttacaaggtcattacacagtctttttgacctcttttgaaggtagagttttagaaggctggatggaagattctgagcctggaattaggaccccatggaggcagttcagtaactaaactaataaagttttgaaaagttacacgtaaagtagaagaatctagtgcgtgggacagtaaaggatcctttctcgtacagaataaaaggtctcagcctgtagcttaaacttatagaaagtgatccgcctgcctgcagaggcgcccttttcagctgctgctcgccagaagcccttgattccactggttgacatggcagcagttactggcaagagggagaaaggacgctgccgcctaagagtgcaaggctgctcaggtctccaagcgccgtaggaggtcacctggcagtgactgtagggagctgggtcatagtgcacgtcgtgggtattaggaaagcctgtattctttcaatgaatgtcagtaggaccttcctttagctgtaagacttggtgggcggggtggggtggggagggaggaaagggtaggaagggtgggaagggagaagcagacatagtcatttatgatttgaaagttggaagtttgtaccatctgtttgagtatatgcacatttaaaaaatatcatatagtaaatgcaaacatgccaagtattttataaagattaataacagacctactcttacctggcagtttacttaacttactgttttgagtcctaaacttagagttgttaatgcttatatataatctaaccaaagagttacccagtagggttttagtttttgaacttttattttcttgttgattataaatcctgattttggaatctattgcgcaaaagaagtttcattttggttacttagacctaagatcacttattaaaaatccttattttctccaagcccagcaaacgttgacttctgggcaaacctgaaaacctgaaaatgccactttcatgcagtttgtttgaagttaagtggaatcctttcaaatgacgagctgcagagaactcagcaccaagggctgcctatctgtagatagctgtaaaatggaatatttttaaatgaaggcaaataagtacttaaaagtgagctgagcaataaaatggtccaataataggtaaatgcaacagaaacagaaggagacctggttgccttatgcctttactcttacatggaataaattcccaatgcatatcctatgtaaaccataagtgaagggaaataaacctcgtcatgctccatgctgtgaggtgtcctttggatattctgtgatgacagagaagcctattttgttttgttttcagcatctttctctgatgtacgtttttaaggattttgtaagagctgttttcagtgtttaaattagtgctatttttccttgtttttaaaaatgaatctcgtactgtatcttactatgtccatacagatgttacaaatcgacagttttattcttagactcatgtgatccaagctgtatataccatatataaacattttacatgaatcatttagttttttaattcatttactaatgctataaaatttcctatattaccccagtaatttgcatcagctggtttatatactaaagcaacatgttttgatgagtttcttacatccttatcgaggaattgggttaggaaaaaatacataattgtaaaactgagtttgctgtattatactttttttcttgagtattagttgtattactaatcatatgttgattaactgtctacttaaagtcaaggtacctgtatttttaatccactaatttttttttagttgggaaatagatttcaagtcttttattagactaacattttttgagaagtaaaattgactttatatacaaagcctgtaattttaggcgaaatggaagcagaaatctaggaagttgtgcttgcttgtatggtctcagactaagtaatgcatcagaattcatctgtttgaagcctgaaataatttaggactctgattcactgaccaaaagtcagtgttgcagagatttctctaccccgtatggtattttgttagattgttcaacaggaagcacatgattgagaacatcttgggacagaccaaaaccactgacagatggcaaggctcggcgattctgatttcccttctcaaatctgctcaactccaagagtcttgagaaactgctaaaattttgcctctgtcactcaagtcttacaaatgttatcttgtaaacctttgaggtgaactattccactgtcttgtacataggcatcttattcactgcaccctgtcacacccagcaccccccgccccgcacattatttgaaagactgggaatttaatggttagggacagtaaatctacttctttttccagggacgactgtcccctctaaagttaaagtcaatacaagaaaactgtctatttttagcctaaagtaaaggctgtgaagaaaattcattttacattgggtagacagtaaaaaacaagtaaaataacttgacatgagcacctttagatcccttcccctccatgggctttgggccacagaatgaacctttgaggcctgtaaagtggattgtaatttcctataagctgtaatagtggaggtattgtgggttcatttgagtaagccctccaaagataccattcaaataacctgggagaatgtcataaattattcagataattatcactgcatgaatctgattcagaggcatgcatttacatatgttgccctaattaccatttgatgatcataaatacaagtgaatgacattggacttttagtaacaaacttaatttttaaaaaagtgtagacaatggtggttaaaaaaaaaaaaaacaggtgccaggttctgtgtgtttgcaccaagtaattgacatgttttttgtttaatacatgtggaccatgaacagtattcattctactttttcaaatgatatgctgtagaaaatattccttgaagatgtgagatttaaaaatttttccctttcaatgttgttttaattgtatttcttacttggtttttttgattgatagcacagtgataaatcataatactagacaaaattgtcttctctttcaaaccagagccatatatatgtctgtatatatgggacctactgcttctctgaggaaatgcataatctgttaatatcagacaaaatgagcaattggcagtgctcataatatattccaatttttattggaattttcgatggaatgttatttcaataaagccatgtaaggtgaaactttgataactttttactcttcaagttagggtaaattctgatccaatattcaattcatttgtgtactcccacatgcaaaatgctaaattacaatgcagacattaagaaaaagtattgactggaggggttgaattccttgagaatttattttatagtctaaatcacaaatactttactcaatttagtttttaaaatagtaaactgaatatttttgttgtaagcctatcagagtcaatccttcgtttggaattgttttcctgtttttccttactataaatcatttaaaaactgaattcattttcttagatggcataagtctgtctcttgagaaataagtaaaatactcctattttcagtatctgtagcacctgaaataggtctttgtatagccagaaacaagttatgttgaagttagcttttctttgtcaacagttttggacaataaaaatctgaaagtattaacacttgattttctactggggcccttcaaacttggttggaagaaattcaaccagaatatctacattagagtataatcatgtgtggtaggaagatggactagttaatcaagatttgttgtcacttaaattttttgtgatttttttccaagccagtttttttaaattctaaatgtgttttgaggtatgggtacattaattgtaatgtaaactattatacaactgtttttgcgactttataggcaggtaaattttgctattactattgaatacaaatgacaattcatttatgaccactcaaacagcgttagtaaccatttagtgacaaaggattaaaacatccatctggatgttaattttgaagatgtaaattatatgttgtttaaatttttccaggcatctgaaaaccttatctgctagacaatgtaagattcacacagagttatctgggattctgattttttaaatagtacatatcattaaaccattttctctaaatgtaagaagagcagaaaaaatcttataagattatcagatttttctaatgacacagaaatgtaagaaaaaaatccctttatattgaaaaaagatgcagtcaaagtcttttcagacatgcccaaactttgagaattccttcaaccatctaatgctataaagatttttgttcttcctgttcacaaccagttgtataacagaaatactagctactgttttccttcctgtgtgtgaagtaatgaatcattgattatgtgacttgttatgtattcaattaaacactaaagaataaaacattcactccttt

SEQ ID NO: 252 - protein, 325 aa, Homo sapiens
MALADSTRGLPNGGGGGGGSGSSSSSAEPPLFPDIVELNVGGQVYVTRRCTVVSVPDSLLWRMFTQQQPQELARDSKGRFFLDRDGFLFRYILDYLRDLQLVLPDYFPERSRLQREAEYFELPELVRRLGAPQQPGPGPPPSRRGVHKEGSLGDELLPLGYSEPEQQEGASAGAPSPTLELASRSPSGGAAGPLLTPSQSLDGSRRSGYITIGYRGSYTIGRDAQADAKFRRVARITVCGKTSLAKEVFGDTLNESRDPDRPPERYTSRYYLKFNFLEQAFDKLSESGFHMVACSSTGTCAFASSTDQSEDKIWTSYTEYVFCRE

SEQ ID NO: 253 - DNA, 1103 bp, Homo sapiens
cacagagcccgggccgcaggcacctcctcgccagctcttccgctcctctcacagccgccagacccgcctgctgagccccatggcccgcgctgctctctccgccgcccccagcaatccccggctcctgcgagtggcactgctgctcctgctcctggtagccgctggccggcgcgcagcaggagcgtccgtggccactgaactgcgctgccagtgcttgcagaccctgcagggaattcaccccaagaacatccaaagtgtgaacgtgaagtcccccggaccccactgcgcccaaaccgaagtcatagccacactcaagaatgggcggaaagcttgcctcaatcctgcatcccccatagttaagaaaatcatcgaaaagatgctgaacagtgacaaatccaactgaccagaagggaggaggaagctcactggtggctgttcctgaaggaggccctgcccttataggaacagaagaggaaagagagacacagctgcagaggccacctggattgtgcctaatgtgtttgagcatcgcttaggagaagtcttctatttatttatttattcattagttttgaagattctatgttaatattttaggtgtaaaataattaagggtatgattaactctacctgcacactgtcctattatattcattctttttgaaatgtcaaccccaagttagttcaatctggattcatatttaatttgaaggtagaatgttttcaaatgttctccagtcattatgttaatatttctgaggagcctgcaacatgccagccactgtgatagaggctggcggatccaagcaaatggccaatgagatcattgtgaaggcaggggaatgtatgtgcacatctgttttgtaactgtttagatgaatgtcagttgttatttattgaaatgatttcacagtgtgtggtcaacatttctcatgttgaaactttaagaactaaaatgttctaaatatcccttggacattttatgtctttcttgtaaggcatactgccttgtttaatggtagttttacagtgtttctggcttagaacaaaggggcttaattattgatgttttcatagagaatataaaaataaagcacttatag

SEQ ID NO: 254 - protein, 107 aa, Homo sapiens
MARAALSAAPSNPRLLRVALLLLLLVAAGRRAAGASVATELRCQCLQTLQGIHPKNIQSVNVKSPGPHCAQTEVIATLKNGRKACLNPASPIVKKIIEKMLNSDKSN

SEQ ID NO: 255 - DNA, 1159 bp, Homo sapiens
agtgccccaggagctatgacaagcaaaggaacatacttgcctggagatagcctttgcgatatttaaatgtccgtggatacagaaatctctgcaggcaagttgctccagagcatattgcaggacaagcctgtaacgaatagttaaattcacggcatctggattcctaatccttttccgaaatggcaggtgtgagtgcctgtataaaatattctatgtttaccttcaacttcttgttctggctatgtggtatcttgatcctagcattagcaatatgggtacgagtaagcaatgactctcaagcaatttttggttctgaagatgtaggctctagctcctacgttgctgtggacatattgattgctgtaggtgccatcatcatgattctgggcttcctgggatgctgcggtgctataaaagaaagtcgctgcatgcttctgttgtttttcataggcttgcttctgatcctgctcctgcaggtggcgacaggtatcctaggagctgttttcaaatctaagtctgatcgcattgtgaatgaaactctctatgaaaacacaaagcttttgagcgccacaggggaaagtgaaaaacaattccaggaagccataattgtgtttcaagaagagtttaaatgctgcggtttggtcaatggagctgctgattggggaaataattttcaacactatcctgaattatgtgcctgtctagataagcagagaccatgccaaagctataatggaaaacaagtttacaaagagacctgtatttctttcataaaagacttcttggcaaaaaatttgattatagttattggaatatcatttggactggcagttattgagatactgggtttggtgttttctatggtcctgtattgccagatcgggaacaaatgaatctgtggatgcatcaacctatcgtcagtcaaacccctttaaaatgttgctttggctttgtaaatttaaatatgtaagtgctatataagtcaggagcagctgtctttttaaaatgtctcggctagctagaccacagatatcttctagacatattgaacacatttaagatttgagggatataagggaaaatgatatgaatgtgtatttttactcaaaataaaagtaactgtttacgttaaaaaaaaaaaaaaaaaaaaaaaaaaaaa

SEQ ID NO: 256 - protein, 237 aa, Homo sapiens
MAGVSACIKYSMFTFNFLFWLCGILILALAIWVRVSNDSQAIFGSEDVGSSSYVAVDILIAVGAIIMILGFLGCCGAIKESRCMLLLFFIGLLLILLLQVATGILGAVFKSKSDRIVNETLYENTKLLSATGESEKQFQEAIIVFQEEFKCCGLVNGAADWGNNFQHYPELCACLDKQRPCQSYNGKQVYKETCISFIKDFLAKNLIIVIGISFGLAVIEILGLVFSMVLYCQIGNK

SEQ ID NO: 257 - DNA, 2849 bp, Homo sapiens
gcggccgcggctcccgagctcctcgggctctgggtcccggcgcccctccggccgcgagtcccacgcgccacccccgggcgccctcgacggtggatctagcggcggcgaggaggcgggtcccggccccggcgaaccccagtcccggcccccggccccgggcccagcttcggcatggatgtgaggttctaccccgcggcggccggggaccctgccagcctggacttcgcgcagtgcctggggtactacggctacagcaagtttggaaataataataactatatgaatatggctgaggcgaacaatgcgttcttcgctgccagtgagcagacattccacacaccaagccttggggacgaggaattcgaaattccaccaatcacgcctcctccagagtcagaccctgccctaggcatgccggatgtactgctaccctttcaagccctcagcgatccattgccttcccagggaagtgaattcacaccccagtttccccctcaaagcctggacctcccttccattacaatctcaagaaatctcgtggaacaagatggcgtgcttcatagcagtgggttgcatatggatcagagccacacacaagtgtcccagtaccggcaggatccctccctgatcatgcggtccatcgtccacatgaccgatgctgcgcgttctggggtcatgcctcctgcccagctcaccaccatcaaccagtctcagctcagcgcccagttggggttgaatttgggaggtgccagtatgcctcacacatctccttcacctccagcaagcaaatcagccactccctccccttccagctccatcaatgaagaggatgctgatgaagccaacagagccattggagagaaaagagctgctccagactctggcaagaagcccaagactccaaagaaaaagaaaaagaaagatcccaatgagccacagaagccagtgtcagcatatgccctgtttttcagagacacacaggctgcaattaaaggtcaaaaccccaatgcaacctttggagaggtctcaaaaattgtagcatctatgtgggacagccttggagaagaacaaaagcaggtatataaaaggaaaacagaagctgccaaaaaagaatacctgaaggccctggcggcatacagggccagcctcgtttctaaggctgctgctgagtcagcagaagcccagaccatccgttctgttcagcagaccctggcgtcgaccaatctaacatcctctctccttctcaacactccactgtctcaacatggaacagtgtcagcatcacctcagactctccagcaatccctccctaggtcaatcgctcccaaacccttaaccatgagactccccatgaaccagattgtcacatcagtcaccattgcagccaacatgccctcgaacattggggctccactgataagctccatgggaacgaccatggttggctcagcaccctccacccaagtgagtccttcggtgcaaacccagcagcatcagatgcaattgcagcagcagcagcagcagcaacaacaacagatgcaacagatgcagcagcagcaactccagcagcaccaaatgcatcagcaaatccagcagcagatgcagcagcagcatttccagcaccacatgcagcagcacctgcagcagcagcagcagcatctccagcagcaaattaatcaacagcagctgcagcagcagctgcagcagcgcctccagctgcagcagctgcaacacatgcagcaccagtctcagccttctcctcggcagcactcccctgtcgcctctcagataacatcccccatccctgccatcgggagcccccagccagcctctcagcagcaccagtcgcaaatacagtctcagacacagactcaagtattatcgcaggctatacctacaatatgtgaatcaaactgtttaatgaatcctgggacatactgatgactataaactggcctctctgagtcatagaaaaatggccttatttctccagaagtgagtaaaccacacttccaggctatctgaactcctgaagccctaaaaataaaaagcacagttgtaactacctgaaatatgaagatccagtttcatacaaacatttgtatgacgtgaatagttgatggcatttttttgtcatgaaaaaaataatgtaaatcacagacttttgccaaagctcttattttttttcctaaatctctccagaaaaaaaatgcaagtgactaaattcaattattgactaatttccactttttatccatgacttctccaaatcaaaccacagtatatgttgtaacaatatctatgaccactgttagcccattatattcattccaattagaagaaatgtgaatactatattccgtgttttgagtgacaagtttcgaaaaataaaaacactgtatttttaaaagggaaatgcacttaaatgaaaacagttattacaaaagttaagatttaaaaagaaaaagcaagagtttttattatgatgtaataccagtagaatatttaaaaggcacaccacatctgaataatcaatgtaaatattttctttcaaagttgtaagttttcatatcatgtgctgtaaagttttcctaaatgaggctttaacgtaaacactggtgacataaaccattcattgctacgttgcttattgtgtttttatgctgttttatacttttttatgagttatgatagcagcaattaagttgtttgtattttgcttaactaaaacaaaaatgcttttatcttgctatagaataaacacatttcagtaaaaactgtggactgtattttgatgcaacaacaaagaaactgttcacttttcaaataaaatgatatgtcagatttca

SEQ ID NO: 258 - protein, 576 aa, Homo sapiens
MDVRFYPAAAGDPASLDFAQCLGYYGYSKFGNNNNYMNMAEANNAFFAASEQTFHTPSLGDEEFEIPPITPPPESDPALGMPDVLLPFQALSDPLPSQGSEFTPQFPPQSLDLPSITISRNLVEQDGVLHSSGLHMDQSHTQVSQYRQDPSLIMRSIVHMTDAARSGVMPPAQLTTINQSQLSAQLGLNLGGASMPHTSPSPPASKSATPSPSSSINEEDADEANRAIGEKRAAPDSGKKPKTPKKKKKKDPNEPQKPVSAYALFFRDTQAAIKGQNPNATFGEVSKIVASMWDSLGEEQKQVYKRKTEAAKKEYLKALAAYRASLVSKAAAESAEAQTIRSVQQTLASTNLTSSLLLNTPLSQHGTVSASPQTLQQSLPRSIAPKPLTMRLPMNQIVTSVTIAANMPSNIGAPLISSMGTTMVGSAPSTQVSPSVQTQQHQMQLQQQQQQQQQQMQQMQQQQLQQHQMHQQIQQQMQQQHFQHHMQQHLQQQQQHLQQQINQQQLQQQLQQRLQLQQLQHMQHQSQPSPRQHSPVASQITSPIPAIGSPQPASQQHQSQIQSQTQTQVLSQVSIF

SEQ ID NO: 259 - DNA, 2892 bp, Homo sapiens
agccccaaactcaccacctggccgtggacacctgtgtcagcatgtgggacctggttctctccatcgccttgtctgtggggtgcactggtgccgtgcccctcatccagtctcggattgtgggaggctgggagtgtgagaagcattcccaaccctggcaggtggctgtgtacagtcatggatgggcacactgtgggggtgtcctggtgcacccccagtgggtgctcacagctgcccattgcctaaagaagaatagccaggtctggctgggtcggcacaacctgtttgagcctgaagacacaggccagagggtccctgtcagccacagcttcccacacccgctctacaatatgagccttctgaagcatcaaagccttagaccagatgaagactccagccatgacctcatgctgctccgcctgtcagagcctgccaagatcacagatgttgtgaaggtcctgggcctgcccacccaggagccagcactggggaccacctgctacgcctcaggctggggcagcatcgaaccagaggagttcttgcgccccaggagtcttcagtgtgtgagcctccatctcctgtccaatgacatgtgtgctagagcttactctgagaaggtgacagagttcatgttgtgtgctgggctctggacaggtggtaaagacacttgtggggtgagtcatccctactcccaacatctggaggggaaagggtgattctgggggtccacttgtctgtaatggtgtgcttcaaggtatcacatcatggggccctgagccatgtgccctgcctgaaaagcctgctgtgtacaccaaggtggtgcattaccggaagtggatcaaggacaccatcgcagccaacccctgagtgcccctgtcccacccctacctctagtaaatttaagtccacctcacgttctggcatcacttggcctttctggatgctggacacctgaagcttggaactcacctggccgaagctcgagcctcctgagtcctactgacctgtgctttctggtgtggagtccagggctgctaggaaaaggaatgggcagacacaggtgtatgccaatgtttctgaaatgggtataatttcgtcctctccttcggaacactggctgtctctgaagacttctcgctcagtttcagtgaggacacacacaaagacgtgggtgaccatgttgtttgtggggtgcagagatgggaggggtggggcccaccctggaagagtggacagtgacacaaggtggacactctctacagatcactgaggataagctggagccacaatgcatgaggcacacacacagcaaggatgacgctgtaaacatagcccacgctgtcctgggggcactgggaagcctagataaggccgtgagcagaaagaaggggaggatcctcctatgttgttgaaggagggactagggggagaaactgaaagctgattaattacaggaggtttgttcaggtcccccaaaccaccgtcagatttgatgatttcctagcaggacttacagaaataaagagctatcatgctgtggtttattatggtttgttacattgatgggatacatactgaaatcagcaaacaaaacagatgtatagattagagtgtggagaaaacagaggaaaacttgcagttacgaagactggcaacttggctttactaagttttcagactggcaggaagtcaaacctattaggctgaggaccttgtggagtgtagctgatccagctgatagaggaactagccaggtgggggcctttccctttggatggggggcatatctgacagttattctctccaagtggagacttacggacagcatataattctccctgcaaggatgtatgataatatgtacaaagtaattccaactgaggaagctcacctgatccttagtgtccaaggtttttactgggggtctgtaggacgagtatggagtacttgaataattgacctgaagtcctcagacctgaggttccctagagttcaaacagatacagcatggtccagagtcccagatgtacaaaaacagggattcatcacaaatcccatctttagcatgaagggtctggcatggcccaaggccccaagtatatcaaggcacttgggcagaacatgccaaggaatcaaatgtcatctcccaggagttattcaagggtgagccctttacttgggatgtacaggctttgagcagtgcagggctgctgagtcaaccttttattgtacaggggatgagggaaagggagaggatgaggaagcccccctggggatttggtttggtcttgtgatcaggtggtctatggggctatccctacaaagaagaatccagaaataggggcacattgaggaatgatactgagcccaaagagcattcaatcattgttttatttgccttcttttcacaccattggtgagggagggattaccaccctggggttatgaagatggttgaacaccccacacatagcaccggagatatgagatcaacagtttcttagccatagagattcacagcccagagcaggaggacgctgcacaccatgcaggatgacatgggggatgcgctcgggattggtgtgaagaagcaaggactgttagaggcaggctttatagtaacaagacggtggggcaaactctgatttccgtgggggaatgtcatggtcttgctttactaagttttgagactggcaggtagtgaaactcattaggctgagaaccttgtggaatgcagctgacccagctgatagaggaagtagccaggtgggagcctttcccagtgggtgtgggacatatctggcaagattttgtggcactcctggttacagatactggggcagcaaataaaactgaatcttgttttcagaccttaaaaaaaaaaaaaaaaaaaaa

SEQ ID NO: 260 - protein, 223 aa, Homo sapiens
MWDLVLSIALSVGCTGAVPLIQSRIVGGWECEKHSQPWQVAVYSHGWAHCGGVLVHPQWVLTAAHCLKKNSQVWLGRHNLFEPEDTGQRVPVSHSFPHPLYNMSLLKHQSLRPDEDSSHDLMLLRLSEPAKITDVVKVLGLPTQEPALGTTCYASGWGSIEPEEFLRPRSLQCVSLHLLSNDMCARAYSEKVTEFMLCAGLWTGGKDTCGVSHPYSQHLEGKG

SEQ ID NO: 261 - DNA, 1027 bp, Homo sapiens
gggcaagagttgggcaaaaaaatcaaggtatttggtcccggaacaaagcttatcattacagataaacaacttgatgcagatgtttcccccaagcccactatttttcttccttcaattgctgaaacaaagctccagaaggctggaacatacctttgtcttcttgagaaatttttccctgatgttattaagatacattggcaagaaaagaagagcaacacgattctgggatcccaggaggggaacaccatgaagactaacgacacatacatgaaatttagctggttaacggtgccagaaaagtcactggacaaagaacacagatgtatcgtcagacatgagaataataaaaacggagttgatcaagaaattatctttcctccaataaagacagatgtcatcacaatggatcccaaagacaattgttcaaaagatgcaaatgatacactactgctgcagctcacaaacacctctgcatattacatgtacctcctcctgctcctcaagagtgtggtctattttgccatcatcacctgctgtctgcttagaagaacggctttctgctgcaatggagagaaatcataacagacggtggcacaaggaggccatcttttcctcatcggttattgtccctagaagcgtcttctgaggatctagttgggctttctttctgggtttgggccatttcagttctcatgtgtgtactattctatcattattgtataacggttttcaaaccagtgggcacacagagaacctcactctgtaataacaatgaggaatagccacggcgatctccagcaccaatctctccatgttttccacagctcctccagccaacccaaatagcgcctgctatagtgtagacatcctgcggcttctagccttgtccctctcttagtgttctttaatcagataactgcctggaagcctttcattttacacgccctgaagcagtcttctttgctagttgaattatgtggtgtgtttttccgtaataagcaaaataaatttaaaaaaatgaaaagtt

SEQ ID NO: 262 - protein, 58 aa, Homo sapiens
MQMFPPSPLFFFLQLLKQSSRRLEHTFVFLRNFSLMLLRYIGKKRRATRFWDPRRGTP

SEQ ID NO: 263 - DNA, 2215 bp, Homo sapiens
agcttttctcttctgtcaaccccacacgcctttggcacaatgaagtgggtaacctttatttcccttctttttctctttagctcggcttattccaggggtgtgtttcgtcgagatgcacacaagagtgaggttgctcatcggtttaaagatttgggagaagaaaatttcaaagccttggtgttgattgcctttgctcagtatcttcagcagtgtccatttgaagatcatgtaaaattagtgaatgaagtaactgaatttgcaaaaacatgtgttgctgatgagtcagctgaaaattgtgacaaatcacttcataccctttttggagacaaattatgcacagttgcaactcttcgtgaaacctatggtgaaatggctgactgctgtgcaaaacaagaacctgagagaaatgaatgcttcttgcaacacaaagatgacaacccaaacctcccccgattggtgagaccagaggttgatgtgatgtgcactgcttttcatgacaatgaagagacatttttgaaaaaatacttatatgaaattgccagaagacatccttacttttatgccccggaactccttttctttgctaaaaggtataaagctgcttttacagaatgttgccaagctgctgataaagctgcctgcctgttgccaaagctcgatgaacttcgggatgaagggaaggcttcgtctgccaaacagagactcaagtgtgccagtctccaaaaatttggagaaagagctttcaaagcatgggcagtagctcgcctgagccagagatttcccaaagctgagtttgcagaagtttccaagttagtgacagatcttaccaaagtccacacggaatgctgccatggagatctgcttgaatgtgctgatgacagggcggaccttgccaagtatatctgtgaaaatcaagattcgatctccagtaaactgaaggaatgctgtgaaaaacctctgttggaaaaatcccactgcattgccgaagtggaaaatgatgagatgcctgctgacttgccttcattagctgctgattttgttgaaagtaaggatgtttgcaaaaactatgctgaggcaaaggatgtcttcctgggcatgtttttgtatgaatatgcaagaaggcatcctgattactctgtcgtgctgctgctgagacttgccaagacatatgaaaccactctagagaagtgctgtgccgctgcagatcctcatgaatgctatgccaaagtgttcgatgaatttaaacctcttgtggaagagcctcagaatttaatcaaacaaaattgtgagctttttgagcagcttggagagtacaaattccagaatgcgctattagttcgttacaccaagaaagtaccccaagtgtcaactccaactcttgtagaggtctcaagaaacctaggaaaagtgggcagcaaatgttgtaaacatcctgaagcaaaaagaatgccctgtgcagaagactatctatccgtggtcctgaaccagttatgtgtgttgcatgagaaaacgccagtaagtgacagagtcaccaaatgctgcacagaatccttggtgaacaggcgaccatgcttttcagctctggaagtcgatgaaacatacgttcccaaagagtttaatgctgaaacattcaccttccatgcagatatatgcacactttctgagaaggagagacaaatcaagaaacaaactgcacttgttgagctcgtgaaacacaagcccaaggcaacaaaagagcaactgaaagctgttatggatgatttcgcagcttttgtagagaagtgctgcaaggctgacgataaggagacctgctttgccgaggagggtaaaaaacttgttgctgcaagtcaagctgccttaggcttataacatctacatttaaaagcatctcagcctaccatgagaataagagaaagaaaatgaagatcaaaagcttattcatctgttttctttttcgttggtgtaaagccaacaccctgtctaaaaaacataaatttctttaatcattttgcctcttttctctgtgcttcaattaataaaaaatggaaagaatctaatagagtggtacagcactgttatttttcaaagatgtgttgctatcctgaaaattctgtaggttctgtggaagttccagtgttctctcttattccacttcggtagaggatttctagtttctgtgggctaattaaataaatcactaatactcttctaagtt

SEQ ID NO: 264 - protein, 609 aa, Homo sapiens [sequence omitted]

SEQ ID NO: 265 - DNA, 2128 bp, Homo sapiens
ctggaaaccactgcaatgacattattcccagtgctgttgttcctggttgctgggctgcttccatcttttccagcaaatgaagataaggatcccgcttttactgctttgttaaccacccaaacacaagtgcaaagggagattgtgaataagcacaatgaactgaggagagcagtatctccccctgccagaaacatgctgaagatggaatggaacaaagaggctgcagcaaatgcccaaaagtgggcaaaccagtgcaattacagacacagtaacccaaaggatcgaatgacaagtctaaaatgtggtgagaatctctacatgtcaagtgcctccagctcatggtcacaagcaatccaaagctggtttgatgagtacaatgattttgactttggtgtagggccaaagactcccaacgcagtggttggacattatacacaggttgtttggtactcttcatacctcgttggatgtggaaatgcctactgtcccaatcaaaaagttctaaaatactactatgtttgccaatattgtcctgctggtaattgggctaatagactatatgtcccttatgaacaaggagcaccttgtgccagttgcccagataactgtgacgatggactatgcaccaatggttgcaagtacgaagatctctatagtaactgtaaaagtttgaagctcacattaacctgtaaacatcagttggtcagggacagttgcaaggcctcctgcaattgttcaaacagcatttattaaatacgcattacacaccgagtagggctatgtagagaggagtcagattatctacttagatttggcatctacttagatttaacatatactagctgagaaattgtaggcatgtttgatacacatttgatttcaaatgtttttcttctggatctgctttttattttacaaaaatatttttcatacaaatggttaaaaagaaacaaaatctataacaacaactttggatttttatatataaactttgtgatttaaatttactgaatttaattagggtgaaaattttgaaagttgtattctcatatgactaagttcactaaaaccctggattgaaagtgaaaattatgttcctagaacaaaatgtacaaaaagaacaatataattttcacatgaacccttggctgtagttgcctttcctagctccactctaaggctaagcatcttcaaagacgttttcccatatgctgtcttaattcttttcactcattcacccttcttcccaatcatctggctggcatcctcacaattgagttgaagctgttcctcctaaaacaatcctgacttttattttgccaaaatcaatacaatcctttgaattttttatctgcataaattttacagtagaatatgatcaaaccttcatttttaaacctctcttctctttgacaaaacttccttaaaaaagaatacaagataatataggtaaataccctccactcaaggaggtagaactcagtcctctcccttgtgagtcttcactaaaatcagtgactcacttccaaagagtggagtatggaaagggaaacatagtaactttacaggggagaaaaatgacaaatgacgtcttcaccaagtgatcaaaattaacgtcaccagtgataagtcattcagatttgttctagataatctttctaaaaattcataatcccaatctaattatgagctaaaacatccagcaaactcaagttgaaggacattctacaaaatatccctggggtattttagagtattcctcaaaactgtaaaaatcatggaaaataagggaatcctgagaaacaatcacagaccacatgagactaaggagacatgtgagccaaatgcaatgtgcttcttggatcagatcctggaacagaaaaagatcagtaatgaaaaaactgatgaagtctgaatagaatctggagtatttttaacagtagtgttgatttcttaatcttgacaaatatagcagggtaatgtaagatgataacgttagagaaactgaaactgggtgagggctatctaggaattctctgtactatcttaccaaattttcggtaagtctaagaaagcaatgcaaaataaaaagtgtcttgaaaaaaaaaaaaaaaaaaaaaaaaaaaaa

SEQ ID NO: 266 - protein, 245 aa, Homo sapiens
MTLFPVLLFLVAGLLPSFPANEDKDPAFTALLTTQTQVQREIVNKHNELRRAVSPPARNMLKMEWNKEAAANAQKWANQCNYRHSNPKDRMTSLKCGENLYMSSASSSWSQAIQSWFDEYNDFDFGVGPKTPNAVVGHYTQVVWYSSYLVGCGNAYCPNQKVLKYYYVCQYCPAGNWANRLYVPYEQGAPCASCPDNCDDGLCTNGCKYEDLYSNCKSLKLTLTCKHQLVRDSCKASCNCSNSIY

SEQ ID NO: 267 - DNA, 5304 bp, Homo sapiens
ggctgggctgcgaatagcgtgttcctctccggcggaacacacacacccggccttggggctgtctcctgagctccctcctccacggagagcgctgagcgccgccgggaattccatcccaccgtgggcacgcagtctttggaggtcccgggcgcagcacgctcggtgtccccacactgcagcaagacagagaccccgcgggaaccttgagcttggaacaacccttgagcctctgcagtcggaagagtgggcgcagcagcccagcggaggccaggcgcgcaacctcgggcgccggggcaaggagagagtgcagggaggcgcagctcaggcgcccggctcaggagcgggaggaagttctcgcggcgccgggagcgcggtggacgcgccctgggcgcacgcccaggcagccttctccctggccctcgggactgtcctcgggccgcaaggaggagcttgctggagtcttagaggccatccagagccagcgagcaggagcgctgcgtctcccgcctcagctaggaagggggagtggcgctggcaggctggagctgggaacccagcgagcgcctgaccttcctcctcctcttcctgaccctcttcgcgtcttgggctccggaggaaggttctagcggctgcaggaggtccccagacccattttcctagaaggctggtgatggatctgctgctcctgccgccgccggggcacttggagcgcaccggcggcgcgtgagctgggctttgctctccactgccctgggcaaaccccgggccagccccgcctggcacctttgcctgagtccctttcggttcccgacccaaagccaccagcgtccagggagggaggaggaggtggtcctcaggtgcagccccgccgagatgtccgcgcagagcctgctccacagcgtcttctcctgttcctcgcccgcttcaagtagcgcggcctcggccaagggcttctccaagaggaagctgcgccagacccgcagcctggacccggccctgatcggcggctgcgggagcgacgaggcgggcgcggagggcagtgcgcggggagccacggcgggccgcctctactccccatcactcccagccgagagtctcggccctcgcttggcgtcctcttcccggggtccgccccccagggccaccaggctaccgcctcctggacctctttgctcgtccttctccacacccagcaccccgcaggagaagtcaccatccggcagctttcactttgactatgaggttcccctgggtcgcggcggcctcaagaagagcatggcctgggacctgccttctgtcctggccgggccagccagtagccgaagcgcttccagcatcctctgttcatccgggggaggccccaatggcatcttcgcttctcctaggaggtggctccagcagaggaagttccagtccccacccgacagtcgcgggcacccctacgtcgtgtggaaatccgagttggagttgtatgatcttcagatcttaggcacaaaaccaccgatgaattccgatacacatcgtaactttgaccccaccgcaacccttagaaatcagggtgatttcacctggaacagcatgtcaggccgcagtgtacggctgaggtcagtccccatccagagtctctcagagctggagagggcccggctgcaggaagtggctttttatcagttgcaacaggactgtgacctgagctgtcagatcaccattcccaaagatggacaaaagagaaagaaatctttaagaaagaaactggattcactaggaaaggagaaaaacaaagacaaagaattcatcccacaggcatttggaatgcccttatcccaagtcattgcgaatgacagggcctataaactcaagcaggacttgcagagggacgagcagaaagatgcatctgactttgtggcttccctcctcccatttggaaataaaagacaaaacaaagaactctcaagcagtaactcatctctcagctcaacctcagaaacaccgaatgagtcaacgtccccaaacaccccggaaccggctcctcgggctaggaggaggggtgccatgtcagtggattctatcaccgatcttgatgacaatcagtctcgactactagaagctttacaactttccttgcctgctgaggctcaaagtaaaaaggaaaaagccagagataagaaactcagtctgaatcctatttacagacaggtccctaggctggtggacagctgctgtcagcacctagaaaaacatggcctccagacagtggggatattccgagttggaagctcaaaaaagagagtgagacaattacgtgaggaatttgaccgtgggattgatgtctctctggaggaggagcacagtgttcatgatgtggcagccttgctgaaagagttcctgagggacatgccagacccccttctcaccagggagctgtacacagctttcatcaacactctcttgttggagccggaggaacagctgggcaccttgcagctcctcatataccttctacctccctgcaactgcgacaccctccaccgcctgctacagttcctctccatcgtggccaggcatgccgatgacaacatcagcaaagatgggcaagaggtcactgggaataaaatgacatctctaaacttagccaccatatttggacccaacctgctgcacaagcagaagtcatcagacaaagaattctcagttcagagttcagcccgggctgaggagagcacggccatcatcgctgttgtgcaaaagatgattgaaaattatgaagccctgttcatggttcccccagatctccagaacgaagtgctgatcagcctgttagagaccgatcctgatgtcgtggactatttactcagaagaaaggcttcccaatcatcaacaagttctgtgcttccggctgcagtgcaggcctgcccacagtaccctgccagcatgtttacgccctgacctggagggaccagctaaggaagccctgacatgctgcagtcggaagtttccttttccgtgggagggaggcattcatctacagactccaacaaggcctccagcggagacatctccccttatgacaacaactccccagtgctgtctgagcgctccctgctggctatgcaagaggacgcggccccggggggctcggagaagctttacagagtgccagggcagtttatgctggtgggccacttgtcgtcgtcaaagtcaagggaaagttctcctggaccaaggcttgggaaagatctgtcagaggagcctttcgatatctggggaacttggcattcaacattaaaaagcggatccaaagacccaggaatgacaggttcctctggagacatttttgaaagcagctccctaagagcggggccctgctccctttctcaagggaacctgtccccaaattggcctcggtggcaggggagccccgcagagctggacagcgacacgcagggggctcggaggactcaggccgcagcccccgcgacggagggcagggcccaccctgcggtgtcgcgcgcctgcagcacgccccacgtccaggtggcagggaaagccgagcggcccacggccaggtcggagcagtacttgaccctgagcggcgcccacgacctcagcgagagtgagctggatgtggccgggctgcagagccgggccacacctcagtgccaaagaccccatgggagtgggagggatgacaagcggcccccgcctccatacccgggcccagggaagcccgcggcagcggcagcctggatccaggggcccccggaaggcgtggagacacccacggaccagggaggccaagcagccgagcgagagcagcaggtcacgcagaaaaaactgagcagcgccaactccctgccagcgggcgagcaggacagtccgcgcctgggggacgctggctggctcgactggcagagagagcgctggcagatctgggagctcctgtcgaccgacaaccccgatgccctgcccgagacgctggtctgagcccgcacccagccgagccccccctgccccgagccccccgccctccagcccaggggggaccgtgggtggtggccactggcacacttagtgttcttctttcacacttctcaaaagtgacacaagagaaatccagttcacctacagaggtagagcactcacgcccccgccattgagaataaggttccattgcgtagccagccttaggaaaaacaaacagaacccaaaccagatggcaatgtccaatctaaaaacgtccctcttggctctataatataagatacaactcttgcttggtatagcctaaccgtatttatgtgtcttcggttttgactattgtgtattctgtaacagattatgtataatcatatatgatatattcacaaagagaaaacaaaaggaacttttaaaaaaaaaatcacttcacttatattaagcaatgagatatactaaacaatgagattctatagaatgttctagaatgtgcacaagcgggtttctgtgcttttgccatagctttataactggggataacccttccttcgataccaaacactaacaagaggaagcagaatatgagaagccatatttttacataggagtcagatacaaaaagaaaaatcactgaatgcttttagatattgaatacgttttcaggaaaatgctaaatctgatagattacgaaatatatttttagaacttgtttagaaaggattcagttaaccaaacaagaaaaaggcagtgcctcacaaagaaattaagaagttgtccgtcccacgttacatcaaattcagttttatataggccatatataatatatatttataatgtataatttttatgtatttttcaaaactacaaactggaatccaactataaagtgtttaagaatctacacagaatattcaaattatagaacatgttttttccctttgccccataatcagtatttgccaaattacatgcaattccttaaaaactaaatcacatttggtaaaaggcctacagctttgtacttacattgtgccaaaggctgaggaaatgttttctttcgtaattttatgtgtattgtaaaatgttctaccgtactttagtagtttgaagtttttcaagtgcataactatttttgaccagcagatggcgatacgcttcagtattttatgcaattttttttcacttctgaagggaaagtgtattataaaaaaagattttttttttttttataaaacatgctactcttaattttcatgttggtgatgaaattcccagtggtgtttcttaaggttctatcttgtgccatgatgaataaaaagttaagcaaag

SEQ ID NO: 268 - protein, 690 aa, Homo sapiens
MSAQSLLHSVFSCSSPASSSAASAKGFSKRKLRQTRSLDPALIGGCGSDEAGAEGSARGATAGRLYSPSLPAESLGPRLASSSRGPPPRATRLPPPGPLCSSFSTPSTPQEKSPSGSFHFDYEVPLGRGGLKKSMAWDLPSVLAGPASSRSASSILCSSGGGPNGIFASPRRWLQQRKFQSPPDSRGHPYVVWKSELELYDLQILGTKPPMNSDTHRNFDPTATLRNQGDFTWNSMSGRSVRLRSVPIQSLSELERARLQEVAFYQLQQDCDLSCQITIPKDGQKRKKSLRKKLDSLGKEKNKDKEFIPQAFGMPLSQVIANDRAYKLKQDLQRDEQKDASDFVASLLPFGNKRQNKELSSSNSSLSSTSETPNESTSPNTPEPAPRARRRGAMSVDSITDLDDNQSRLLEALQLSLPAEAQSKKEKARDKKLSLNPIYRQVPRLVDSCCQHLEKHGLQTVGIFRVGSSKKRVRQLREEFDRGIDVSLEEEHSVHDVAALLKEFLRDMPDPLLTRELYTAFINTLLLEPEEQLGTLQLLIYLLPPCNCDTLHRLLQFLSIVARHADDNISKDGQEVTGNKMTSLNLATIFGPNLLHKQKSSDKEFSVQSSARAEESTAIIAVVQKMIENYEALFMVPPDLQNEVLISLLETDPDVVDYLLRRKASQSSTSSVLPAAVQACPQYPASMFTP

SEQ ID NO: 269 - DNA, 3084 bp, Homo sapiens
aagatctaaaaacggacatctccaccgtgggtggctcctttttctttttctttttttcccacccttcaggaagtggacgtttcgttatcttctgatccttgcaccttcttttggggaaacggggcccttctgcccagatcccctctcttttctcggaaaacaaactactaagtcggcatccggggtaactacagtggagagggtttccgcggagacgcgccgccggaccctcctctgcactttggggaggcgtgctccctccagaaccggcgttctccgcgcgcaaatcccggcgacgcggggtcgcggggtggccgccggggcagcctcgtctagcgcgcgccgcgcagacgcccccggagtcgccagctaccgcagccctcgccgcccagtgcccttcggcctcggggcgggcgcctgcgtcggtctccgcgaagcgggaaagcgcggcggccgccgggattcgggcgccgcggcagctgctccggctgccggccggcggccccgcgctcgcccgccccgcttccgcccgctgtcctgctgcacgaacccttccaactctcctttcctcccccacccttgagttacccctctgtctttcctgctgttgcgcgggtgctcccacagcggagcggagattacagagccgccgggatgccccaactctccggaggaggtggcggcggcgggggggacccggaactctgcgccacggacgagatgatccccttcaaggacgagggcgatcctcagaaggaaaagatcttcgccgagatcagtcatcccgaagaggaaggcgatttagctgacatcaagtcttccttggtgaacgagtctgaaatcatcccggccagcaacggacacgaggtggccagacaagcacaaacctctcaggagccctaccacgacaaggccagagaacaccccgatgacggaaagcatccagatggaggcctctacaacaagggaccctcctactcgagttattccgggtacataatgatgccaaatatgaataacgacccatacatgtcaaatggatctctttctccacccatcccgagaacatcaaataaagtgcccgtggtgcagccatcccatgcggtccatcctctcacccccctcatcacttacagtgacgagcacttttctccaggatcacacccgtcacacatcccatcagatgtcaactccaaacaaggcatgtccagacatcctccagctcctgatatccctactttttatcccttgtctccgggtggtgttggacagatcaccccacctcttggctggcaaggtcagcctgtatatcccatcacgggtggattcaggcaaccctacccatcctcactgtcagtcgacacttccatgtccaggttttcccatcatatgattcccggtcctcctggtccccacacaactggcatccctcatccagctattgtaacacctcaggtcaaacaggaacatccccacactgacagtgacctaatgcacgtgaagcctcagcatgaacagagaaaggagcaggagccaaaaagacctcacattaagaagcctctgaatgcttttatgttatacatgaaagaaatgagagcgaatgtcgttgctgagtgtactctaaaagaaagtgcagctatcaaccagattcttggcagaaggtggcatgccctctcccgtgaagagcaggctaaatattatgaattagcacggaaagaaagacagctacatatgcagctttatccaggctggtctgcaagagacaattatggtaagaaaaagaagaggaagagagagaaactacaggaatctgcatcaggtacaggtccaagaatgacagctgcctacatctgaaacatggtggaaaacgaagctcattcccaacgtgcaaagccaaggcagcgaccccaggacctcttctggagatggaagcttgttgaaaacccagactgtctccacggcctgcccagtcgacgccaaaggaacactgacatcaattttaccctgaggtcactgctagagacgctgatccataaagacaatcactgccaacccctctttcgtctactgcaagagccaagttccaaaataaagcataaaaaggttttttaaaaggaaatgtaaaagcacatgagaatgctagcaggctgtggggcagctgagcagcttttctccccccatatctgcgtgcacttcccagagcatcttgcatccaaacctgtaacctttcggcaaggacggtaacttggctgcatttgcctgtcatgcgcaactggagccagcaaccagctatccatcagcaccccagtggaggagttcatggaagagttccctctttgtttctgcttcatttttctttcttttcttttctcctaaagcttttatttaacagtgcaaaaggatcgtttttttttgcttttttaaacttgaatttttttaatttacactttttagttttaattttcttgtatattttgctagctatgagcttttaaataaaattgaaagttctggaaaagtttgaaataatgacataaaaagaagccttctttttctgagacagcttgtctggtaagtggcttctctgtgaattgcctgtaacacatagtggcttctccgcccttgtaaggtgttcagtagagctaaataaatgtaatagccaaaccccactctgttggtagcaattggcagccctatttcagtttattttttcttctgttttcttcttttctttttttaaacagtaaaccttaacagatgcgttcagcagactggtttgcagtgaattttcatttctttccttatcacccccttgttgtaaaaagcccagcacttgaattgttattactttaaatgttctgtatttgtatctgtttttattagccaattagtgggattttatgccagttgttaaaatgagcattgatgtacccattttttaaaaaagcaagcacagcctttgcccaaaactgtcatcctaacgtttgtcattccagtttgagttaatgtgctgagcatttttttaaaagaagctttgtaataaaacatttttaaaaattgtcatttaaaaaaaaaaaaaaaaaa

SEQ ID NO: 270 - protein, 399 aa, Homo sapiens
MPQLSGGGGGGGGDPELCATDEMIPFKDEGDPQKEKIFAEISHPEEEGDLADIKSSLVNESEIIPASNGHEVARQAQTSQEPYHDKAREHPDDGKHPDGGLYNKGPSYSSYSGYIMMPNMNNDPYMSNGSLSPPIPRTSNKVPVVQPSHAVHPLTPLITYSDEHFSPGSHPSHIPSDVNSKQGMSRHPPAPDIPTFYPLSPGGVGQITPPLGWQGQPVYPITGGFRQPYPSSLSVDTSMSRFSHHMIPGPPGPHTTGIPHPAIVTPQVKQEHPHTDSDLMHVKPQHEQRKEQEPKRPHIKKPLNAFMLYMKEMRANVVAECTLKESAAINQILGRRWHALSREEQAKYYELARKERQLHMQLYPGWSARDNYGKKKKRKREKLQESASGTGPRMTAAYI

SEQ ID NO: 271 - DNA, 4685 bp, Homo sapiens
gggagcgcggggagcgcgggccggcggcggcgagggaggacgggggcgcagacggccggcgcgcggcgcggctaccatgggcgtgcggtgagcagccgctcgggacgacttcctcggctgcgcggcgctcgcgcggagctccccggccggcggtgcgtccccacggtcaccatgaaagacgacttcgcagaggaggaggaggtgcaatccttcggttacaagcggtttggtattcaggaaggaacacaatgtaccaaatgtaaaaataactgggcactgaagttttctatcatattattatacattttgtgtgccttgctaacaatcacagtagccattttgggatataaagttgtagagaaaatggacaatgtcacaggtggcatggaaacatctcgccaaacctatgatgacaagctcacagcagtggaaagtgacctgaaaaaattaggtgaccaaactgggaagaaagctatcagcaccaactcagaactctccaccttcagatcagacattctagatctccgtcagcaacttcgtgagattacagaaaaaaccagcaagaacaaggatacgctggagaagttacaggcgagcggggatgctctggtggacaggcagagtcaattgaaagaaactttggagaataactctttcctcatcaccactgtaaacaaaaccctccaggcgtataatggctatgtcacgaatctgcagcaagataccagcgtgctccagggcaatctgcagaaccaaatgtattctcataatgtggtcatcatgaacctcaacaacctgaacctgacccaggtgcagcagaggaacctcatcacgaatctgcagcggtctgtggatgacacaagccaggctatccagcgaatcaagaacgactttcaaaatctgcagcaggtttttcttcaagccaagaaggacacggattggctgaaggagaaagtgcagagcttgcagacactggctgccaacaactctgcgttggccaaagccaacaacgacaccctggaggatatgaacagccagctcaactcattcacaggtcagatggagaacatcaccactatctctcaagccaacgagcagaacctgaaagacctgcaggacttacacaaagatgcagagaatagaacagccatcaagttcaaccaactggaggaacgcttccagctctttgagacggatattgtgaacatcattagcaatatcagttacacagcccaccacctgcggacgctgaccagcaatctaaatgaagtcaggaccacttgcacagatacccttaccaaacacacagatgatctgacctccttgaataataccctggccaacatccgtttggattctgtttctctcaggatgcaacaagatttgatgaggtcgaggttagacactgaagtagccaacttatcagtgattatggaagaaatgaagctagtagactccaagcatggtcagctcatcaagaattttacaatactacaaggtccaccgggccccaggggtccaagaggtgacagaggatcccagggaccccctggcccaactggcaacaagggacagaaaggagagaagggggagcctggaccacctggccctgcgggtgagagaggcccaattggaccagctggtccccccggagagcgtggcggcaaaggatctaaaggctcccagggccccaaaggctcccgtggttcccctgggaagcccggccctcagggccccagtggggacccaggccccccgggcccaccaggcaaagagggactccccggccctcagggccctcctggcttccagggacttcagggcaccgttggggagcctggggtgcctggacctcggggactgccaggcttgcctggggtaccaggcatgccaggccccaagggcccccccggccctcctggcccatcaggagcggtggtgcccctggccctgcagaatgagccaaccccggcaccggaggacaatagtaagtccaagccctccctccagccagggggacagggcagtgcatgtgcttgagactgagccaacccccagtgtgtggccccacccatgttatttttgtttttgtttttgttttgagacagggtctcactctgttgcccaggctggagtgcagtggcgtgatctcggctcactgcaacccccacatcccgggttcaagtgattctcctgccttagcctcccaggtagctgggaatacaagcgtgtgcccccacagccagctaatttttgtatttttagtagagaggggtttcacagtgttgggcagggtggtttcaaacttctggcctcaagtgatccacctacctagtttcccaaagtgctgggaatacaggtgtgaaccaccacgttttgtcccccggctgcatattatttaacagcaaaggcatcataggggttggcacaggagccctgctgccagaacaggcctccataccaggcatgtgtctctctctaaacgccattgggttttttagtgctcatttgttttatgtattatgtgtgtatgtatgggacagggtctcactctgtcacccaggctggaatgacgaagtgaagtagtgcaaacatagctcattgcagctttgacctcctgggcttaggtgatcttcccactcagactcctgcgtagctgggaccacaggggtatgccaccacacctggctaattttttattttcctttttgtagaaacagggtcttgctatgttgcccaggctggtcttgaactcctggcctcaagcaaccctcctgcctcagtcttgcaaagtgctgggattccaggtgggagccactgcacctggctcttgcacttgtttatttataggagccagccctcagaagacaaacacaatgcaaaacatttccttcagggaagcctgctggccgccctgagcgctcttccctcgttttacatcctcactctggagatagatgggctccctcggttagctccatcaacatgtggatggaaccctctgctattgatgactacatttaatttctttttgagaaaggtgttagatgttacggtgccttctagtcttttgataattaaacctttggcaaaactcgaatgtttggttagcaaccaagcctatttttctctcctttgacccaaccgctattctacttgattttggtcggtgaggcccgggttatttttgttgatccgtgagcccatttttggtgctgggttctcacatccaagtgttcctgggttccgtatgattccagactgacgctgaacatctgtgcctgccctgcttcttgttgttgcttctgtcatttctgtcattgtgaagacggatccaaacacagaagaacaaagacccagtccaagatccatccagattatgtggtttcggcttgtgctctgcagtccactttgggtcatgcttgctgcgagcacgtccgtgaacgtcagctgtgggcctcgtgcagggacgctcaggctgctcccagcgggaccacagttttggcctctgaaacacagctgaagaaaggcagagtgctttctgtgatcttttaatcaatgttttccacttttgcattcctaggctgcccgcctcactggaagaacttcacagacaaatgctactatttttcagttgagaaagaaatttttgaggatgcaaagcttttctgtgaagacaagtcttcacatcttgttttcataaacactagagaggaacagcaatggataaaaaaacagatggtagggagagagagccactggatcggcctcacagactcagagcgtgaaaatgaatggaagtggctggatgggacatctccagactacaaaaattggaaagctggacagccggataactggggtcatggccatgggccaggagaagactgtgctgggttgatttatgctgggcagtggaacgatttccaatgtgaagacgtcaataacttcatttgcgaaaaagacagggagacagtactgtcatctgcattataacggactgtgatgggatcacatgagcaaattttcagctctcaaaggcaaaggacactcctttctaattgcatcaccttctcatcagattgaaaaaaaaaaagcactgaaaaccaattactgaaaaaaaattgacagctagtgttttttaccatccgtcattacccaaagacttgggaactaaaatgttccccagggtgatatgctgattttcattgtgcacatggactgaatcacatagattctcctccgtcagtaaccgtgcgattatacaaattatgtcttccaaagtatggaacactccaatcagaaaaaggttatcattggtcgttgagttatgggaagaacttaagcatatactgtgtaaacagtgccatacatttctaaaatcccaagtgtaggaaaaatatgcagacatacagatatataggccaactattagtaataatatgaaatatacttaaagagcttttaaaactttgtatttttgtacaaaatatttgtcttttacaatttttttcctttttttttttttgtcattttaccgacataatacatggagccaaagaaaacaataatggtactaataaaaactcctagggtttcctgtcagatttaattctacccagtggcaaagaattttttcaattgtggctttaaaaaaataattaaatatacatgtatatatatat

SEQ ID NO: 272 - protein, 622 aa, Homo sapiens
MKDDFAEEEEVQSFGYKRFGIQEGTQCTKCKNNWALKFSIILLYILCALLTITVAILGYKVVEKMDNVTGGMETSRQTYDDKLTAVESDLKKLGDQTGKKAISTNSELSTFRSDILDLRQQLREITEKTSKNKDTLEKLQASGDALVDRQSQLKETLENNSFLITTVNKTLQAYNGYVTNLQQDTSVLQGNLQNQMYSHNVVIMNLNNLNLTQVQQRNLITNLQRSVDDTSQAIQRIKNDFQNLQQVFLQAKKDTDWLKEKVQSLQTLAANNSALAKANNDTLEDMNSQLNSFTGQMENITTISQANEQNLKDLQDLHKDAENRTAIKFNQLEERFQLFETDIVNIISNISYTAHHLRTLTSNLNEVRTTCTDTLTKHTDDLTSLNNTLANIRLDSVSLRMQQDLMRSRLDTEVANLSVIMEEMKLVDSKHGQLIKNFTILQGPPGPRGPRGDRGSQGPPGPTGNKGQKGEKGEPGPPGPAGERGPIGPAGPPGERGGKGSKGSQGPKGSRGSPGKPGPQGPSGDPGPPGPPGKEGLPGPQGPPGFQGLQGTVGEPGVPGPRGLPGLPGVPGMPGPKGPPGPPGPSGAVVPLALQNEPTPAPEDNSKSKPSLQPGGQGSACA

SEQ ID NO: 273 - DNA, 2560 bp, Homo sapiens
ctcaaaaggggccggatttccttctcctggaggcagatgttgcctctctctctcgctcggattggttcagtgcactctagaaacactgctgtggtggagaaactggaccccaggtctggagcgaattccagcctgcagggctgataagcgaggcattagtgagattgagagagactttaccccgccgtggtggttggagggcgcgcagtagagcagcagcacaggcgcgggtcccgggaggccggctctgctcgcgccgagatgtggaatctccttcacgaaaccgactcggctgtggccaccgcgcgccgcccgcgctggctgtgcgctggggcgctggtgctggcgggtggcttctttctcctcggcttcctcttcgggtggtttataaaatcctccaatgaagctactaacattactccaaagcataatatgaaagcatttttggatgaattgaaagctgagaacatcaagaagttcttatataattttacacagataccacatttagcaggaacagaacaaaactttcagcttgcaaagcaaattcaatcccagtggaaagaatttggcctggattctgttgagctagcacattatgatgtcctgttgtcctacccaaataagactcatcccaactacatctcaataattaatgaagatggaaatgagattttcaacacatcattatttgaaccacctcctccaggatatgaaaatgtttcggatattgtaccacctttcagtgctttctctcctcaaggaatgccagagggcgatctagtgtatgttaactatgcacgaactgaagacttctttaaattggaacgggacatgaaaatcaattgctctgggaaaattgtaattgccagatatgggaaagttttcagaggaaataaggttaaaaatgcccagctggcaggggccaaaggagtcattctctactccgaccctgctgactactttgctcctggggtgaagtcctatccagatggttggaatcttcctggaggtggtgtccagcgtggaaatatcctaaatctgaatggtgcaggagaccctctcacaccaggttacccagcaaatgaatatgcttataggcgtggaattgcagaggctgttggtcttccaagtattcctgttcatccaattggatactatgatgcacagaagctcctagaaaaaatgggtggctcagcaccaccagatagcagctggagaggaagtctcaaagtgccctacaatgttggacctggctttactggaaacttttctacacaaaaagtcaagatgcacatccactctaccaatgaagtgacaagaatttacaatgtgataggtactctcagaggagcagtggaaccagacagatatgtcattctgggaggtcaccgggactcatgggtgtttggtggtattgaccctcagagtggagcagctgttgttcatgaaattgtgaggagctttggaacactgaaaaaggaagggtggagacctagaagaacaattttgtttgcaagctgggatgcagaagaatttggtcttcttggttctactgagtgggcagaggagaattcaagactccttcaagagcgtggcgtggcttatattaatgctgactcatctatagaaggaaactacactctgagagttgattgtacaccgctgatgtacagcttggtacacaacctaacaaaagagctgaaaagccctgatgaaggctttgaaggcaaatctctttatgaaagttggactaaaaaaagtccttccccagagttcagtggcatgcccaggataagcaaattgggatctggaaatgattttgaggtgttcttccaacgacttggaattgcttcaggcagagcacggtatactaaaaattgggaaacaaacaaattcagcggctatccactgtatcacagtgtctatgaaacatatgagttggtggaaaagttttatgatccaatgtttaaatatcacctcactgtggcccaggttcgaggagggatggtgtttgagctagccaattccatagtgctcccttttgattgtcgagattatgctgtagttttaagaaagtatgctgacaaaatctacagtatttctatgaaacatccacaggaaatgaagacatacagtgtatcatttgattcacttttttctgcagtaaagaattttacagaaattgcttccaagttcagtgagagactccaggactttgacaaaagcaagcatgtcatctatgctccaagcagccacaacaagtatgcaggggagtcattcccaggaatttatgatgctctgtttgatattgaaagcaaagtggacccttccaaggcctggggagaagtgaagagacagatttatgttgcagccttcacagtgcaggcagctgcagagactttgagtgaagtagcctaagaggattctttagagaatccgtattgaatttgtgtggtatgtcactcagaaagaatcgtaatgggtatattgataaattttaaaattggtatatttgaaataaagttgaatattatatataaaaaaaaaaaaaaaaaaa

SEQ ID NO: 274 - protein, 719 aa, Homo sapiens
MWNLLHETDSAVATARRPRWLCAGALVLAGGFFLLGFLFGWFIKSSNEATNITPKHNMKAFLDELKAENIKKFLYNFTQIPHLAGTEQNFQLAKQIQSQWKEFGLDSVELAHYDVLLSYPNKTHPNYISIINEDGNEIFNTSLFEPPPPGYENVSDIVPPFSAFSPQGMPEGDLVYVNYARTEDFFKLERDMKINCSGKIVIARYGKVFRGNKVKNAQLAGAKGVILYSDPADYFAPGVKSYPDGWNLPGGGVQRGNILNLNGAGDPLTPGYPANEYAYRRGIAEAVGLPSIPVHPIGYYDAQKLLEKMGGSAPPDSSWRGSLKVPYNVGPGFTGNFSTQKVKMHIHSTNEVTRIYNVIGTLRGAVEPDRYVILGGHRDSWVFGGIDPQSGAAVVHEIVRSFGTLKKEGWRPRRTILFASWDAEEFGLLGSTEWAEENSRLLQERGVAYINADSSIEGNYTLRVDCTPLMYSLVHNLTKELKSPDEGFEGKSLYESWTKKSPSPEFSGMPRISKLGSGNDFEVFFQRLGIASGRARYTKNWETNKFSGYPLYHSVYETYELVEKFYDPMFKYHLTVAQVRGGMVFELANSIVLPFDCRDYAVVLRKYADKIYSISMKHPQEMKTYSVSFDSLFSAVKNFTEIASKFSERLQDFDKSKHVIYAPSSHNKYAGESFPGIYDALFDIESKVDPSKAWGEVKRQIYVAAFTVQAAAETLSEVA

SEQ ID NO: 275 - DNA, 551 bp, Homo sapiens
accccatccgctggctctcacccctcggagacgctcgcccgacagcatagtacttgccgcccagccacgcccgcgcgccagccaccatgctaggtaacaagcgactggggctgtccggactgaccctcgccctgtccctgctcgtgtgcctgggtgcgctggccgaggcgtacccctccaagccggacaacccgggcgaggacgcaccagcggaggacatggccagatactactcggcgctgcgacactacatcaacctcatcaccaggcagagatatggaaaacgatccagcccagagacactgatttcagacctcttgatgagagaaagcacagaaaatgttcccagaactcggcttgaagaccctgcaatgtggtgatgggaaatgagacttgctctctggccttttcctattttcagcccatatttcatcgtgtaaaacgagaatccacccatcctaccaatgcatgcagccactgtgctgaattctgcaatgttttcctttgtcatcattgtatatatgtgtgtttaaataaagtatcatgcattc

SEQ ID NO: 276 - protein, 97 aa, Homo sapiens
MLGNKRLGLSGLTLALSLLVCLGALAEAYPSKPDNPGEDAPAEDMARYYSALRHYINLITRQRYGKRSSPETLISDLLMRESTENVPRTRLEDPAMW

SEQ ID NO: 277 - DNA, 1907 bp, Homo sapiens
agcaaaaacctcctggcaaaggaggagaggaggttgtgcgggacaaccttctcctgacagaaggatgtcgctgctgagcctgtcttggctgggcctcaggccggtggcagcatccccgtggctgctcctgctggtggtcggggcctcctggctcctggcccgcatcctggcctggacctatgccttctatcacaacggccgccgcctccggtgtttcccgcagccccggaaacagaactggttcttgggtcacctgggcctggtcactcccacagaggagggcttgagggtcctgacccagctggtggccacctacccccagggctttgtgaggtggttgggccccatcactcccatcatcaacttgtgccaccctgacatcgtccgatctgtcatcaatacctcagatgccattacagacaaggacatagtcttctacaagaccctgaagccctggctgggggatgggctcttgttaagtgttggtgacaagtggagacaccaccgtcgcttgctgacgcctgccttccatttcaacatcctgaagccctatataaagattttcagcaagagtgcaaacatcatgcatgccaagtggcaacgcctggccatggagggcagcacctgtctggatgtgtttgagcacatcagccttatgaccctggacagtctgcagaaatgcatcttcagctttgacagcaattgtcaggagaagcccagtgaatatattactgcgatcatggagctcagtgcccttgtagtgaaacggaataaccagttcttccggtacaaggacttcctgtacttcctcactccctgtggacggcgcttccacagggcctgcagactggtgcacgacttcacagatgccgtcatccaggagcggcgccgcaccctcactagccagggtgttgatgacttcctccaagccaaggccaagtccaagactttggactttattgatgtgctcctgctgagcgaggataaaaatggtaaagagttgtcagatgaggacataagagcagaagctgacactttcatgtttggaggccatgacaccacggccagtggcctctcctgggtcttgtacaacctcgcgaggcacccagaataccaagaacgctgccggcaggaggtgcaagagcttctgaaggaccgtgagcctaaagagattgaatgggacgacctggcccagttgcccttcctgaccatgtgcctgaaggagagcctgcggttgcatcccccaatccctacattcgcccgcggctgcacccaggacgtggtgctcccagacagccgagtcatccccaaagggaatgtctgtaacatcaacatcttcgcaatccatcacaacccctcagtctggccagaccctgaggtctatgaccccttccgcttcgacccagaaaacgcccagaagaggtcacctatggcttttattcctttctcggcggggcccaggaactgcatcgggcagaagttcgcgatggcagagatgaaggtggtcctggcgctcacgctgctgcgcttccgcatcctgcccgaccacagggagccacgcaggacgccggagattgttttgcgtgcggaggacggactttggctgcgagtagaacccctgggctgaggcctgcagtgacccacccacctacctttgcatcacctacctttgcaccaactaccttttcagatttccggtaataaatctgtgttggcccctgtgcctcagtcccgcggatggccagtagggggcgctggaggactgcggggatctagggcctggctgggaagaggcggggagatgtctctgtgcccaagatactcactgcctctctgggtgagcacaggagccccgtgctgagggtgggatctcccagagtctaagtaaagactttttcccccccaaa

SEQ ID NO: 278 - protein, 520 aa, Homo sapiens
MSLLSLSWLGLRPVAASPWLLLLVVGASWLLARILAWTYAFYHNGRRLRCFPQPRKQNWFLGHLGLVTPTEEGLRVLTQLVATYPQGFVRWLGPITPIINLCHPDIVRSVINTSDAITDKDIVFYKTLKPWLGDGLLLSVGDKWRHHRRLLTPAFHFNILKPYIKIFSKSANIMHAKWQRLAMEGSTCLDVFEHISLMTLDSLQKCIFSFDSNCQEKPSEYITAIMELSALVVKRNNQFFRYKDFLYFLTPCGRRFHRACRLVHDFTDAVIQERRRTLTSQGVDDFLQAKAKSKTLDFIDVLLLSEDKNGKELSDEDIRAEADTFMFGGHDTTASGLSWVLYNLARHPEYQERCRQEVQELLKDREPKEIEWDDLAQLPFLTMCLKESLRLHPPIPTFARGCTQDVVLPDSRVIPKGNVCNINIFAIHHNPSVWPDPEVYDPFRFDPENAQKRSPMAFIPFSAGPRNCIGQKFAMAEMKVVLALTLLRFRILPDHREPRRTPEIVLRAEDGLWLRVEPLG

SEQ ID NO: 279 - DNA, 2673 bp, Homo sapiens
gtgccgcgcccagagcagcagcaacagcgaagatgcgaggccattacctgtttgatccctgtcggaaacctggcacgggccaacttttcccgattatcacgccaagaagttgcaaggactagtcgaagactcggaggggccagggcgagggcgcgctcccccgcgcgctgcctcctccctcctccctccggccgcccgagctcccggcctctctcccgcccgcgctcactccctccgcccgcctccctcctctggccccctccgcgcggcacagggcggggggtgccgcgaaactccgacccgagccacttggacttgcacagtgtccgccgggcgcaggggccgaccgcacgcagtcgcgcagttctgcctccgcctgccagtctcgcccgcgatcccggcccggggctgtggcgtcgactccgacccaggcagccagcagcccgcgcgggagccggaccgccgccggaggagctcggacggcatgctgagccccctccttggctgaagcccgagtgcggagaagcccgggcaaacgcaggctaaggagaccaaagcggcgaagtcgcgagacagcggacaagcagcggaggagaaggaggaggaggcgaacccagagaggggcagcaaaagaagcggtggtggtgggcgtcgtggccatggcggcggctatcgccagctcgctcatccgtcagaagaggcaagcccgcgagcgcgagaaatccaacgcctgcaagtgtgtcagcagccccagcaaaggcaagaccagctgcgacaaaaacaagttaaatgtcttttcccgggtcaaactcttcggctccaagaagaggcgcagaagaagaccagagcctcagcttaagggtatagttaccaagctatacagccgacaaggctaccacttgcagctgcaggcggatggaaccattgatggcaccaaagatgaggacagcacttacactctgtttaacctcatccctgtgggtctgcgagtggtggctatccaaggagttcaaaccaagctgtacttggcaatgaacagtgagggatacttgtacacctcggaacttttcacacctgagtgcaaattcaaagaatcagtgtttgaaaattattatgtgacatattcatcaatgatataccgtcagcagcagtcaggccgagggtggtatctgggtctgaacaaagaaggagagatcatgaaaggcaaccatgtgaagaagaacaagcctgcagctcattttctgcctaaaccactgaaagtggccatgtacaaggagccatcactgcacgatctcacggagttctcccgatctggaagcgggaccccaaccaagagcagaagtgtctctggcgtgctgaacggaggcaaatccatgagccacaatgaatcaacgtagccagtgagggcaaaagaagggctctgtaacagaaccttacctccaggtgctgttgaattcttctagcagtccttcacccaaaagttcaaatttgtcagtgacatttaccaaacaaacaggcagagttcactattctatctgccattagaccttcttatcatccatactaaagccccattatttagattgagcttgtgcataagaatgccaagcattttagtgaactaaatctgagagaaggactgccaaattttctcatgatctcacctatgactttggggatgataatccaaaagtatttcacagcactaatgctgatcaaaatttgctctcccaccaagaaaatgtaaaagaccacaattgttcttcaaaaacaaacaaaacaaaacaaaacaaaattaactgcttaaatgttttgtcggggcaaacaaaattatgtgaattgtgttgttttcttggcttgatgttttctatctacgcttgattcacatgtactcttttctttggcatagtgcaactttatgatttctgaaattcaatggttctattgactttttgcgtcacttaatccaaatcaaccaaattcagggttgaatctgaattggcttctcaggctcaaggtaacagtgttcttgtggtttgaccaattgtttttctttctttttttttttttagatttgtggtattctggtcaagttattgtgctgtactttgtgcgtagaaatgtgagttgtattgtcaaccccagtcagtaaagagaacttcaaaaaattatcctcaagtgtagatttctcttaattccatttgtgtatcatgttaaactattgttgtggcttcttgtgtaaagacaggaactgtggaactgtgatgttgtcttttgtgttgttaaaataagaaatgtcttatctgtatatgtatgagtcttcctgtcattgtatttggcacatgaatattgtgtacaaggaattgttaagactggttttccctcaacaacatatattatacttgctactggaaaagtgtttaagacttagctaggtttccatttagatcttcatatctgttgcatggaagaaagttgggttcttggcatagagttgcatgatatgtaagattttgtgcattcataattgttaaaaatctgtgttccaaaagtggacatagcatgtacaggcagttttctgtcctgtgcacaaaaagtttaaaaaagttgtttaatatttgttgttgtatacccaaatacgcaccgaataaactctttatattcattcaaaga

SEQ ID NO: 280 - protein, 245 aa, Homo sapiens
MAAAIASSLIRQKRQAREREKSNACKCVSSPSKGKTSCDKNKLNVFSRVKLFGSKKRRRRRPEPQLKGIVTKLYSRQGYHLQLQADGTIDGTKDEDSTYTLFNLIPVGLRVVAIQGVQTKLYLAMNSEGYLYTSELFTPECKFKESVFENYYVTYSSMIYRQQQSGRGWYLGLNKEGEIMKGNHVKKNKPAAHFLPKPLKVAMYKEPSLHDLTEFSRSGSGTPTKSRSVSGVLNGGKSMSHNEST

SEQ ID NO: 281 - DNA, 2820 bp, Homo sapiens
gggagttcagacctagatctttccagttaatcacacaacaaacttagctcatcgcaataaaaagcagctcagagccgactggctcttttaggcactgactccgaacaggattctttcacccaggcatctcctccagagggatccgccagcccgtccagcagcaccatgtgggtgaccaaactcctgccagccctgctgctgcagcatgtcctcctgcatctcctcctgctccccatcgccatcccctatgcagagggacaaaggaaaagaagaaatacaattcatgaattcaaaaaatcagcaaagactaccctaatcaaaatagatccagcactgaagataaaaaccaaaaaagtgaatactgcagaccaatgtgctaatagatgtactaggaataaaggacttccattcacttgcaaggcttttgtttttgataaagcaagaaaacaatgcctctggttccccttcaatagcatgtcaagtggagtgaaaaaagaatttggccatgaatttgacctctatgaaaacaaagactacattagaaactgcatcattggtaaaggacgcagctacaagggaacagtatctatcactaagagtggcatcaaatgtcagccctggagttccatgataccacacgaacacagctttttgccttcgagctatcggggtaaagacctacaggaaaactactgtcgaaatcctcgaggggaagaagggggaccctggtgtttcacaagcaatccagaggtacgctacgaagtctgtgacattcctcagtgttcagaagttgaatgcatgacctgcaatggggagagttatcgaggtctcatggatcatacagaatcaggcaagatttgtcagcgctgggatcatcagacaccacaccggcacaaattcttgcctgaaagatatcccgacaagggctttgatgataattattgccgcaatcccgatggccagccgaggccatggtgctatactcttgaccctcacacccgctgggagtactgtgcaattaaaacatgcgctgacaatactatgaatgacactgatgttcctttggaaacaactgaatgcatccaaggtcaaggagaaggctacaggggcactgtcaataccatttggaatggaattccatgtcagcgttgggattctcagtatcctcacgagcatgacatgactcctgaaaatttcaagtgcaaggacctacgagaaaattactgccgaaatccagatgggtctgaatcaccctggtgttttaccactgatccaaacatccgagttggctactgctcccaaattccaaactgtgatatgtcacatggacaagattgttatcgtgggaatggcaaaaattatatgggcaacttatcccaaacaagatctggactaacatgttcaatgtgggacaagaacatggaagacttacatcgtcatatcttctgggaaccagatgcaagtaagctgaatgagaattactgccgaaatccagatgatgatgctcatggaccctggtgctacacgggaaatccactcattccttgggattattgccctatttctcgttgtgaaggtgataccacacctacaatagtcaatttagaccatcccgtaatatcttgtgccaaaacgaaacaattgcgagttgtaaatgggattccaacacgaacaaacataggatggatggttagtttgagatacagaaataaacatatctgcggaggatcattgataaaggagagttgggttcttactgcacgacagtgtttcccttctcgagacttgaaagattatgaagcttggcttggaattcatgatgtccacggaagaggagatgagaaatgcaaacaggttctcaatgtttcccagctggtatatggccctgaaggatcagatctggttttaatgaagcttgccaggcctgctgtcctggatgattttgttagtacgattgatttacctaattatggatgcacaattcctgaaaagaccagttgcagtgtttatggctggggctacactggattgatcaactatgatggcctattacgagtggcacatctctatataatgggaaatgagaaatgcagccagcatcatcgagggaaggtgactctgaatgagtctgaaatatgtgctggggctgaaaagattggatcaggaccatgtgagggggattatggtggcccacttgtttgtgagcaacataaaatgagaatggttcttggtgtcattgttcctggtcgtggatgtgccattccaaatcgtcctggtatttttgtccgagtagcatattatgcaaaatggatacacaaaattattttaacatataaggtaccacagtcatagctgaagtaagtgtgtctgaagcacccaccaatacaactgtcttttacatgaagatttcagagaatgtggaatttaaaatgtcacttacaacaatcctaagacaactactggagagtcatgtttgttgaaattctcattaatgtttatgggtgttttctgttgttttgtttgtcagtgttattttgtcaatgttgaagtgaattaaggtacatgcaagtgtaataacatatctcctgaagatacttgaatggattaaaaaaacacacaggtatatttgctggatgataaagatttcatgggaaaaaaaatcaattaatctgtctaagctgctttctgatgttggtttcttaataatgagtaaaccacaaattaaatgttattttaacctcaccaaaacaatttataccttgtgtccctaaattgtagccctatattaaattatattacatttcaaaaaaaaaaaaaaaa

SEQ ID NO: 282 - protein, 728 aa, Homo sapiens
MWVTKLLPALLLQHVLLHLLLLPIAIPYAEGQRKRRNTIHEFKKSAKTTLIKIDPALKIKTKKVNTADQCANRCTRNKGLPFTCKAFVFDKARKQCLWFPFNSMSSGVKKEFGHEFDLYENKDYIRNCIIGKGRSYKGTVSITKSGIKCQPWSSMIPHEHSFLPSSYRGKDLQENYCRNPRGEEGGPWCFTSNPEVRYEVCDIPQCSEVECMTCNGESYRGLMDHTESGKICQRWDHQTPHRHKFLPERYPDKGFDDNYCRNPDGQPRPWCYTLDPHTRWEYCAIKTCADNTMNDTDVPLETTECIQGQGEGYRGTVNTIWNGIPCQRWDSQYPHEHDMTPENFKCKDLRENYCRNPDGSESPWCFTTDPNIRVGYCSQIPNCDMSHGQDCYRGNGKNYMGNLSQTRSGLTCSMWDKNMEDLHRHIFWEPDASKLNENYCRNPDDDAHGPWCYTGNPLIPWDYCPISRCEGDTTPTIVNLDHPVISCAKTKQLRVVNGIPTRTNIGWMVSLRYRNKHICGGSLIKESWVLTARQCFPSRDLKDYEAWLGIHDVHGRGDEKCKQVLNVSQLVYGPEGSDLVLMKLARPAVLDDFVSTIDLPNYGCTIPEKTSCSVYGWGYTGLINYDGLLRVAHLYIMGNEKCSQHHRGKVTLNESEICAGAEKIGSGPCEGDYGGPLVCEQHKMRMVLGVIVPGRGCAIPNRPGIFVRVAYYAKWIHKIILTYKVPQS

SEQ ID NO: 283 - DNA, 1561 bp, Homo sapiens
cgcacgccacccgcccgccgcctgccagagctgctcggcccgcagccagggggacagcggctggtcggaggctcgcagtgctgtcggcgagaagcagtcgggtttggagcgcttgggtcgcgttggtgcgcggtggacacgagggaccccagttcccgcgagcagctccgcgccggccctgagagactaagctgaaactgctgctcagctcccaagatggtgccacccaaattgcatgtgcttttctgcctctgcggctgcctggctgtggtttatccttttgactggcaatacataaatcctgttgcccatatgaaatcatcagcatgggtcaacaaaatacaagtactgatggctgctgcaagctttggccaaactaaaatcccccggggaaatgggccttattccgttggttgtacagacttaatgtttgatcacactaataagggcaccttcttgcgtttatattatccatcccaagataatgatcgccttgacaccctttggatcccaaataaagaatatttttggggtcttagcaaatttcttggaacacactggcttatgggcaacattttgaggttactctttggttcaatgacaactcctgcaaactggaattcccctctgaggcctggtgaaaaatatccacttgttgttttttctcatggtcttggggcattcaggacactttattctgctattggcattgacctggcatctcatgggtttatagttgctgctgtagaacacagagatagatctgcatctgcaacttactatttcaaggaccaatctgctgcagaaataggggacaagtcttggctctaccttagaaccctgaaacaagaggaggagacacatatacgaaatgagcaggtacggcaaagagcaaaagaatgttcccaagctctcagtctgattcttgacattgatcatggaaagccagtgaagaatgcattagatttaaagtttgatatggaacaactgaaggactctattgatagggaaaaaatagcagtaattggacattcttttggtggagcaacggttattcagactcttagtgaagatcagagattcagatgtggtattgccctggatgcatggatgtttccactgggtgatgaagtatattccagaattcctcagcccctcttttttatcaactctgaatatttccaatatcctgctaatatcataaaaatgaaaaaatgctactcacctgataaagaaagaaagatgattacaatcaggggttcagtccaccagaattttgctgacttcacttttgcaactggcaaaataattggacacatgctcaaattaaagggagacatagattcaaatgcagctattgatcttagcaacaaagcttcattagcattcttacaaaagcatttaggacttcataaagattttgatcagtgggactgcttgattgaaggagatgatgagaatcttattccagggaccaacattaacacaaccaatcaacacatcatgttacagaactcttcaggaatagagaaatacaattaggattaaaataggtttttta

SEQ ID NO: 284 - protein, 441 aa, Homo sapiens
MVPPKLHVLFCLCGCLAVVYPFDWQYINPVAHMKSSAWVNKIQVLMAAASFGQTKIPRGNGPYSVGCTDLMFDHTNKGTFLRLYYPSQDNDRLDTLWIPNKEYFWGLSKFLGTHWLMGNILRLLFGSMTTPANWNSPLRPGEKYPLVVFSHGLGAFRTLYSAIGIDLASHGFIVAAVEHRDRSASATYYFKDQSAAEIGDKSWLYLRTLKQEEETHIRNEQVRQRAKECSQALSLILDIDHGKPVKNALDLKFDMEQLKDSIDREKIAVIGHSFGGATVIQTLSEDQRFRCGIALDAWMFPLGDEVYSRIPQPLFFINSEYFQYPANIIKMKKCYSPDKERKMITIRGSVHQNFADFTFATGKIIGHMLKLKGDIDSNAAIDLSNKASLAFLQKHLGLHKDFDQWDCLIEGDDENLIPGTNINTTNQHIMLQNSSGIEKYN

SEQ ID NO: 285 - DNA, 3678 bp, Homo sapiens
gacgcgcgccgggagccgcgggccgggccagccgggccgccggggcccagtgcgccgcgctcgcagccggtagcgcgccagcgccgtaggcgctcgctcggcagccgcggggccctaggccgtgccggggagggggcgagggcggcgcccaggcgcctgccgccccggaggcaggatgagcatcgagatcccggcgggactgacggagctgctgcagggcttcacggtggaggtgctgaggcaccagcccgcggacctgctggagttcgcgctgcagcacttcacccgcctgcagcaggagaacgagcgcaaaggcaccgcgcgcttcggccatgagggcaggacctggggggacctgggcgccgctgccgggggcggcacccccagcaagggggtcaacttcgccgaggagcccatgcagtccgactccgaggacggggaggaggaggaggcggcgcccgcggacgcaggggcgttcaatgctccagtaataaaccgattcacaaggcgtgcctcagtatgtgcagaagcttataatcctgatgaagaagaagatgatgcagagtccaggattatacatccaaaaactgatgatcaaagaaataggttgcaagaggcttgcaaagacatcctgctgtttaagaatctggatccggagcagatgtctcaagtattagatgccatgtttgaaaaattggtcaaagatggggagcatgtaattgatcaaggtgacgatggtgacaacttttatgtaattgatagaggcacatttgatatttatgtgaaatgtgatggtgttggaagatgtgttggtaactatgataatcgtgggagtttcggcgaactggccttaatgtacaatacacccagagcagctacaatcactgctacctctcctggtgctctgtggggtttggacagggtaaccttcaggagaataattgtgaaaaacaatgccaaaaagagaaaaatgtatgaaagctttattgagtcactgccattccttaaatctttggagttttctgaacgcctgaaagtagtagatgtgataggcaccaaagtatacaacgatggagaacaaatcattgctcagggagattcggctgattcttttttcattgtagaatctggagaagtgaaaattactatgaaaagaaagggtaaatcagaagtggaagagaatggtgcagtagaaatcgctcgatgctcgcggggacagtactttggagagcttgccctggtaactaacaaacctcgagcagcttctgcccacgccattgggactgtcaaatgtttagcaatggatgtgcaagcatttgaaaggcttctgggaccttgcatggaaattatgaaaaggaacatcgctacctatgaagaacagttagttgccctgtttggaacgaacatggatattgttgaacccactgcatgaagcaaaagtatggagcaagacctgtagtgacaaaattacacagtagtggttagtccactgagaatgtgtttgtgtagatgccaagcattttctgtgatttcaggttttttcctttttttacatttacaacgtatcaataaacagtagtgatttaatagtcaataggctttaacatcactttctaaagagtagttcataaaaaaatcaacatactgataaaatgactttgtactccacaaaattatgactgaaaggtttattaaaatgattgtaatatatagaaagtatctgtgtttaagaagataattaaaggatgttatcataggctatatgtgttttacttattcagactgataatcatattagtgactatccccatgtaagagggcacttggcaattaaacatgctacacagcatggcatcacttttttttataactcattaaacacagtaaaattttaatcatttttgttttaaagttttctagcttgataagttatgtgctggccttggcctattggtgaaatggtataaaatatcatatgcagttttaaaactttttatatttttgcaataaagtacattttgactttgttggcataatgtcagtaacatacatattccagtggttttatggacaggcaatttagtcattatgataataaggaaaacagtgttttagatgagagatcattaatgcatttttccctcatcaagcatatatctgcttttttttattttgcaattctctgtattctatgtctttaaaaatttgatcttgacatttaatgtcacaaagttttgtttttttaaaaagtgatttaaacttaagatccgacattttttgtattctttaagattttacacctaaaaaatctctcctatcccaaaaataatgtgggatccttatcagcatgcccacagtttatttctttgttcttcactaggcctgcataatacagtcctatgtagacatctgttcccttgggtttccgttctttcttaggatggttgccaacccacaatctcattgatcagcagccaatatgggtttgtttggtttttttaattcttaaaaacatcctctagaggaatagaaacaaatttttatgagcataaccctatataaagacaaaatgaatttctgaccttaccatatataccattaggccttgccattgctttaatgtagactcatagttgaaattagtgcagaaagaactcagatgtactagattttcattgttcattgatatgctcagtatgctgccacataagatgaatttaattatattcaaccaaagcaatatactcttacatgatttctaggccccatgacccagtgtctagagacattaattctaaccagttgtttgcttttaaatgagtgatttcattttgggaaacaggtttcaaatgaatatatatacatgggtaaaattactctgtgctagtgtagtcttactagagaatgtttatggtcccacttgtatatgaaaatgtggttagaatgttaattggataatgtatatataagaagttaaagtatgtaaagtataacttcagccacatttttagaacactgtttaacatttttgcaaaaccttcttgtaggaaaagagagctctctacatgaagatgacttgttttatatttcagattttattttaaaagccatgtctgttaaacaagaaaaaacacaaaagaactccagattcctggttcatcattctgtattcttactcactttttcaagttatctattttgttgcataaactaattgttaactattcatggaacagcaaacgcctgtttaataaagaactttgaccaaggctataaatgccacgtacattattttcagtattgttggttatatttaaattttccttacaataaagcacacttttataataaaatacatgaattattgtttttcatacttttttgcttgtttctttaaagttttctgacgtgcataatgcataattcattgaaaagcatgatagcaatgtggcatgtggaagcgaacccccagggcataacatagtaagaaagtatggttctgtatggcaataggtttttaaaattattagctattcatcatgtgtgggagaaataattgtggtgtgttgcagatttatttggccatttagaataaccaaatcaatctggctaactaggaatttatgtgtaaaattatctgattaaaacagctcaagtttgaaaaaaaaaaaaaaaaaa

SEQ ID NO: 286 - protein, 418 aa, Homo sapiens
MSIEIPAGLTELLQGFTVEVLRHQPADLLEFALQHFTRLQQENERKGTARFGHEGRTWGDLGAAAGGGTPSKGVNFAEEPMQSDSEDGEEEEAAPADAGAFNAPVINRFTRRASVCAEAYNPDEEEDDAESRIIHPKTDDQRNRLQEACKDILLFKNLDPEQMSQVLDAMFEKLVKDGEHVIDQGDDGDNFYVIDRGTFDIYVKCDGVGRCVGNYDNRGSFGELALMYNTPRAATITATSPGALWGLDRVTFRRIIVKNNAKKRKMYESFIESLPFLKSLEFSERLKVVDVIGTKVYNDGEQIIAQGDSADSFFIVESGEVKITMKRKGKSEVEENGAVEIARCSRGQYFGELALVTNKPRAASAHAIGTVKCLAMDVQAFERLLGPCMEIMKRNIATYEEQLVALFGTNMDIVEPTA

SEQ ID NO: 287 - DNA, 3089 bp, Homo sapiens
agcagttcctcctaactcctgccagaaacagctctcctcaacatgagagctgcacccctcctcctggccagggcagcaagccttagccttggcttcttgtttctgctttttttctggctagaccgaagtgtactagccaaggagttgaagtttgtgactttggtgtttcggcatggagaccgaagtcccattgacacctttcccactgaccccataaaggaatcctcatggccacaaggatttggccaactcacccagctgggcatggagcagcattatgaacttggagagtatataagaaagagatatagaaaattcttgaatgagtcctataaacatgaacaggtttatattcgaagcacagacgttgaccggactttgatgagtgctatgacaaacctggcagccctgtttcccccagaaggtgtcagcatctggaatcctatcctactctggcagcccatcccggtgcacacagttcctctttctgaagatcagttgctatacctgcctttcaggaactgccctcgttttcaagaacttgagagtgagactttgaaatcagaggaattccagaagaggctgcacccttataaggattttatagctaccttgggaaaactttcaggattacatggccaggacctttttggaatttggagtaaagtctacgaccctttatattgtgagagtgttcacaatttcactttaccctcctgggccactgaggacaccatgactaagttgagagaattgtcagaattgtccctcctgtccctctatggaattcacaagcagaaagagaaatctaggctccaagggggtgtcctggtcaatgaaatcctcaatcacatgaagagagcaactcagataccaagctacaaaaaacttatcatgtattctgcgcatgacactactgtgagtggcctacagatggcgctagatgtttacaacggactccttcctccctatgcttcttgccacttgacggaattgtactttgagaagggggagtactttgtggagatgtactaccggaatgagacgcagcacgagccgtatcccctcatgctacctggctgcagccccagctgtcctctggagaggtttgctgagctggttggccctgtgatccctcaagactggtccacggagtgtatgaccacaaacagccatcaaggtactgaggacagtacagattagtgtgcacagagatctctgtagaaagagtagctgccctttctcagggcagatgatgctttgagaacatactttggccattaccccccagctttgaggaaaatgggctttggatgattattttatgttttagggacccccaacctcaggcaattcctacctcttcacctgaccctgcccccacttgccataaaacttagctaagttttgttttgtttttcagcgttaatgtaaaggggcagcagtgccaaaatataatcagagataaagcttaggtcaaagttcatagagttcccatgaactatatgactggccacacaggatcttttgtatttaaggattctgagattttgcttgagcaggattagataagtctgttctttaaatttctgaaatggaacagatttcaaaaaaaattcccacaatctagggtgggaacaaggaaggaaagatgtgaataggctgatggggaaaaaaccaatttacccatcagttccagccttctctcaaggagaggcaaagaaaggagatacagtggagacatctggaaagttttctccactggaaaactgctactatctgtttttatatttctgttaaaatatatgaggctacagaactaaaaattaaaacctctttgtgtcccttggtcctggaacatttatgttccttttaaagaaacaaaaatcaaactttacagaaagatttgatgtatgtaatacatatagcagctcttgaagtatatatatcatagcaaataagtcatctgatgagaacaagctatttgggcacaacacatcaggaaagagagcaccacgtgatggagtttctccagaagctccagtgataagagatgttgactctaaagttgatttaaggccaggcatggtggtttacgcctataatcccagcattttgggactccgaggtgggcagatcacttgagctcaggagctcaagatcagcctgggcaacatggtgaaaccttgtctctacataaaatacaaaaacttagatgggcatggtgctgtgtgcctatagtccactacttgtggggctaaggcaggaggatcacttgagccccggaggtcgaggctacagtgacccaagagtgcactactgtactccagccagggcaagagagcgagaccctgtctcaataaataaataaataaataaataaataaataaataaaaacaaagttgattaagaaaggaagtataggccaggcacagtggctcacacctgtaatccttgcattttggaaggctgaggcaggaggatcactttaggcctggtgtgttcaagaccagcctggtcaacatagtgagacactgtctctaccaaaaaaaggaaggaagggacacatatcaaactgaaacaaaattagaaatgtaattatgttatgttctaagtgcctccaagttcaaaacttattggaatgttgagagtgtggttacgaaatacgttaggaggacaaaaggaatgtgtaagtctttaatgccgatatcttcagaaaacctaagcaaacttacaggtcctgctgaaactgcccactctgcaagaagaaatcatgatatagctttccatgtggcagatctacatgtctagagaacactgtgctctattaccattatggataaagatgagatggtttctagagatggtttctactggctgccagaatctagagcaaagccatcccccctcctggttggtcacagaatgactgacaaagacatcgattgatatgcttctttgtgttatttccctcccaagtaaatgtttgtccttgggtccattttctatgcttgtaactgtcttctagcagtgagccaaatgtaaaatagtgaataaagtcattattaggaagttcaaaaaaaaaaaa

SEQ ID NO: 288 - protein, 386 aa, Homo sapiens
MRAAPLLLARAASLSLGFLFLLFFWLDRSVLAKELKFVTLVFRHGDRSPIDTFPTDPIKESSWPQGFGQLTQLGMEQHYELGEYIRKRYRKFLNESYKHEQVYIRSTDVDRTLMSAMTNLAALFPPEGVSIWNPILLWQPIPVHTVPLSEDQLLYLPFRNCPRFQELESETLKSEEFQKRLHPYKDFIATLGKLSGLHGQDLFGIWSKVYDPLYCESVHNFTLPSWATEDTMTKLRELSELSLLSLYGIHKQKEKSRLQGGVLVNEILNHMKRATQIPSYKKLIMYSAHDTTVSGLQMALDVYNGLLPPYASCHLTELYFEKGEYFVEMYYRNETQHEPYPLMLPGCSPSCPLERFAELVGPVIPQDWSTECMTTNSHQGTEDSTD

SEQ ID NO: 289 - DNA, 3737 bp, Homo sapiens
ggcgtccgcgcacacctccccgcgccgccgccgccaccgcccgcactccgccgcctctgcccgcaaccgctgagccatccatgggggtcgcgggccgcaaccgtcccggggcggcctgggcggtgctgctgctgctgctgctgctgccgccactgctgctgctggcgggggccgtcccgccgggtcggggccgtgccgcggggccgcaggaggatgtagatgagtgtgcccaagggctagatgactgccatgccgacgccctgtgtcagaacacacccacctcctacaagtgctcctgcaagcctggctaccaaggggaaggcaggcagtgtgaggacatcgatgaatgtggaaatgagctcaatggaggctgtgtccatgactgtttgaatattccaggcaattatcgttgcacttgttttgatggcttcatgttggctcatgacggtcataattgtcttgatgtggacgagtgcctggagaacaatggcggctgccagcatacctgtgtcaacgtcatggggagctatgagtgctgctgcaaggaggggtttttcctgagtgacaatcagcacacctgcattcaccgctcggaagagggcctgagctgcatgaataaggatcacggctgtagtcacatctgcaaggaggccccaaggggcagcgtcgcctgtgagtgcaggcctggttttgagctggccaagaaccagagagactgcatcttgacctgtaaccatgggaacggtgggtgccagcactcctgtgacgatacagccgatggcccagagtgcagctgccatccacagtacaagatgcacacagatgggaggagctgccttgagcgagaggacactgtcctggaggtgacagagagcaacaccacatcagtggtggatggggataaacgggtgaaacggcggctgctcatggaaacgtgtgctgtcaacaatggaggctgtgaccgcacctgtaaggatacttcgacaggtgtccactgcagttgtcctgttggattcactctccagttggatgggaagacatgtaaagatattgatgagtgccagacccgcaatggaggttgtgatcatttctgcaaaaacatcgtgggcagttttgactgcggctgcaagaaaggatttaaattattaacagatgagaagtcttgccaagatgtggatgagtgctctttggataggacctgtgaccacagctgcatcaaccaccctggcacatttgcttgtgcttgcaaccgagggtacaccctgtatggcttcacccactgtggagacaccaatgagtgcagcatcaacaacggaggctgtcagcaggtctgtgtgaacacagtgggcagctatgaatgccagtgccaccctgggtacaagctccactggaataaaaaagactgtgtggaagtgaaggggctcctgcccacaagtgtgtcaccccgtgtgtccctgcactgcggtaagagtggtggaggagacgggtgcttcctcagatgtcactctggcattcacctctcttcagatgtcaccaccatcaggacaagtgtaacctttaagctaaatgaaggcaagtgtagtttgaaaaatgctgagctgtttcccgagggtctgcgaccagcactaccagagaagcacagctcagtaaaagagagcttccgctacgtaaaccttacatgcagctctggcaagcaagtcccaggagcccctggccgaccaagcacccctaaggaaatgtttatcactgttgagtttgagcttgaaactaaccaaaaggaggtgacagcttcttgtgacctgagctgcatcgtaaagcgaaccgagaagcggctccgtaaagccatccgcacgctcagaaaggccgtccacagggagcagtttcacctccagctctcaggcatgaacctcgacgtggctaaaaagcctcccagaacatctgaacgccaggcagagtcctgtggagtgggccagggtcatgcagaaaaccaatgtgtcagttgcagggctgggacctattatgatggagcacgagaacgctgcattttatgtccaaatggaaccttccaaaatgaggaaggacaaatgacttgtgaaccatgcccaagaccaggaaattctggggccctgaagaccccagaagcttggaatatgtctgaatgtggaggtctgtgtcaacctggtgaatattctgcagatggctttgcaccttgccagctctgtgccctgggcacgttccagcctgaagctggtcgaacttcctgcttcccctgtggaggaggccttgccaccaaacatcagggagctacttcctttcaggactgtgaaaccagagttcaatgttcacctggacatttctacaacaccaccactcaccgatgtattcgttgcccagtgggaacataccagcctgaatttggaaaaaataattgtgtttcttgcccaggaaatactacgactgactttgatggctccacaaacataacccagtgtaaaaacagaagatgtggaggggagctgggagatttcactgggtacattgaatccccaaactacccaggcaattacccagccaacaccgagtgtacgtggaccatcaacccaccccccaagcgccgcatcctgatcgtggtccctgagatcttcctgcccatagaggacgactgtggggactatctggtgatgcggaaaacctcttcatccaattctgtgacaacatatgaaacctgccagacctacgaacgccccatcgccttcacctccaggtcaaagaagctgtggattcagttcaagtccaatgaagggaacagcgctagagggttccaggtcccatacgtgacatatgatgaggactaccaggaactcattgaagacatagttcgagatggcaggctctatgcatctgagaaccatcaggaaatacttaaggataagaaacttatcaaggctctgtttgatgtcctggcccatccccagaactatttcaagtacacagcccaggagtcccgagagatgtttccaagatcgttcatccgattgctacgttccaaagtgtccaggtttttgagaccttacaaatgactcagcccacgtgccactcaatacaaatgttctgctatagggttggtgggacagagctgtcttccttctgcatgtcagcacagtcgggtattgctgcctcccgtatcagtgactcattagagttcaatttttatagataatacagatattttggtaaattgaacttggtttttctttcccagcatcgtggatgtagactgagaatggctttgagtggcatcagcttctcactgctgtgggcggatgtcttggatagatcacgggctggctgagctggactttggtcagcctaggtgagactcacctgtccttctggggtcttactcctcctcaaggagtctgtagtggaaaggaggccacagaataagctgcttattctgaaacttcagcttcctctagcccggccctctctaagggagccctctgcactcgtgtgcaggctctgaccaggcagaacaggcaagaggggagggaaggagacccctgcaggctccctccacccaccttgagacctgggaggactcagtttctccacagccttctccagcctgtgtgatacaagtttgatcccaggaacttgagttctaagcagtgctcgtgaaaaaaaaaagcagaaagaattagaaataaataaaaactaagcacttctggagacat

SEQ ID NO: 290 - protein, 999 aa, Homo sapiens
MGVAGRNRPGAAWAVLLLLLLLPPLLLLAGAVPPGRGRAAGPQEDVDECAQGLDDCHADALCQNTPTSYKCSCKPGYQGEGRQCEDIDECGNELNGGCVHDCLNIPGNYRCTCFDGFMLAHDGHNCLDVDECLENNGGCQHTCVNVMGSYECCCKEGFFLSDNQHTCIHRSEEGLSCMNKDHGCSHICKEAPRGSVACECRPGFELAKNQRDCILTCNHGNGGCQHSCDDTADGPECSCHPQYKMHTDGRSCLEREDTVLEVTESNTTSVVDGDKRVKRRLLMETCAVNNGGCDRTCKDTSTGVHCSCPVGFTLQLDGKTCKDIDECQTRNGGCDHFCKNIVGSFDCGCKKGFKLLTDEKSCQDVDECSLDRTCDHSCINHPGTFACACNRGYTLYGFTHCGDTNECSINNGGCQQVCVNTVGSYECQCHPGYKLHWNKKDCVEVKGLLPTSVSPRVSLHCGKSGGGDGCFLRCHSGIHLSSDVTTIRTSVTFKLNEGKCSLKNAELFPEGLRPALPEKHSSVKESFRYVNLTCSSGKQVPGAPGRPSTPKEMFITVEFELETNQKEVTASCDLSCIVKRTEKRLRKAIRTLRKAVHREQFHLQLSGMNLDVAKKPPRTSERQAESCGVGQGHAENQCVSCRAGTYYDGARERCILCPNGTFQNEEGQMTCEPCPRPGNSGALKTPEAWNMSECGGLCQPGEYSADGFAPCQLCALGTFQPEAGRTSCFPCGGGLATKHQGATSFQDCETRVQCSPGHFYNTTTHRCIRCPVGTYQPEFGKNNCVSCPGNTTTDFDGSTNITQCKNRRCGGELGDFTGYIESPNYPGNYPANTECTWTINPPPKRRILIVVPEIFLPIEDDCGDYLVMRKTSSSNSVTTYETCQTYERPIAFTSRSKKLWIQFKSNEGNSARGFQVPYVTYDEDYQELIEDIVRDGRLYASENHQEILKDKKLIKALFDVLAHPQNYFKYTAQESREMFPRSFIRLLRSKVSRFLRPYK

SEQ ID NO: 291 - DNA, 1758 bp, Homo sapiens
cacgagcggcacgaggatttccagctcagcgatgcccccaggtccctgggagagctgcttctgggtggggggcctcattttgtggctcagcgttggaagttcaggggatgcacctcctaccccacagccaaagtgcgctgacttccagagcgccaacctttttgaaggcaccgatctcaaagtccagtttctcctctttgtcccttcgaatcctagctgtgggcagctagtagaaggaagcagtgacctccaaaactctgggttcaatgccactctgggaaccaaactaattatccatggattcagggttttaggaacaaagccttcctggattgacacatttattagaacccttctgcgtgcaacgaatgctaatgtgattgccgtggactggatttatgggtctacaggagtctacttctcagctgtgaaaaatgtgattaagttgagcctcgagatctcccttttcctcaataaactcctggtgctgggtgtgtcggaatcctcaatccacatcattggtgttagcctgggggcccacgttgggggcatggtgggacagctcttcggaggccagctgggacagatcacaggcctggaccccgctggacctgagtacaccagggccagtgtggaagagcgcttggatgctggagatgccctcttcgtggaagccatccacacagacaccgacaatttgggtattcggattcccgttggacatgtggactacttcgtcaacggaggccaagaccaacctggctgccccaccttcttttacgcaggttatagttatctgatctgtgatcacatgagggctgtgcacctctacatcagcgccctggagaattcctgtccactgatggcctttccctgtgccagctacaaggccttccttgctggacgctgtctggattgctttaacccttttctgctttcctgcccaaggataggactggtggaacaaggtggtgtcaagatagagccgctccccaaggaagtgaaagtctacctcctgactacttccagtgctccgtactgcatgcatcacagcctcgtggagtttcacttgaaggaactgagaaacaaggacaccaacatcgaggttaccttccttagcagtaacatcacctcttcatctaagatcaccatacctaagcagcaacgctatgggaaaggaatcatagcccatgccaccccacaatgccagataaaccaagtgaaattcaagtttcagtcttccaaccgagtttggaaaaaagaccggactaccattattgggaagttctgcactgcccttttgcctgtcaatgacagagaaaagatggtctgcttacctgaaccagtgaacttacaagcaagtgtgactgtttcctgtgacctgaagatagcctgtgtgtagtttaacctgggcaggacacatctccctgcattttttttttttttttttgagagagaggtgtgatgagggatgtgtgtgtgcagcttattgtagaccattactactaaggagaaaagcaaagctctttcttattttcctcataatcagctaccctggaggggagggagaactcattttacagaacttggtttcctttgccgatcttatgtacatacccattttagctttcccatgcatacttaactgcacttgctttatctccttgggcattcgtacttaggattcaatagaaacatgtacagggtaaacaattttttaaaaataaaacttcatggagtaaaaaaaaaaaaaaaaaa

SEQ ID NO: 292 - protein, 456 aa, Homo sapiens
MPPGPWESCFWVGGLILWLSVGSSGDAPPTPQPKCADFQSANLFEGTDLKVQFLLFVPSNPSCGQLVEGSSDLQNSGFNATLGTKLIIHGFRVLGTKPSWIDTFIRTLLRATNANVIAVDWIYGSTGVYFSAVKNVIKLSLEISLFLNKLLVLGVSESSIHIIGVSLGAHVGGMVGQLFGGQLGQITGLDPAGPEYTRASVEERLDAGDALFVEAIHTDTDNLGIRIPVGHVDYFVNGGQDQPGCPTFFYAGYSYLICDHMRAVHLYISALENSCPLMAFPCASYKAFLAGRCLDCFNPFLLSCPRIGLVEQGGVKIEPLPKEVKVYLLTTSSAPYCMHHSLVEFHLKELRNKDTNIEVTFLSSNITSSSKITIPKQQRYGKGIIAHATPQCQINQVKFKFQSSNRVWKKDRTTIIGKFCTALLPVNDREKMVCLPEPVNLQASVTVSCDLKIACV

SEQ ID NO: 293 - DNA, 1874 bp, Homo sapiens
gcaggtgaggcacgtttagcctgagccggccacggactccacttcccctgctcttcccccagtggcaaatccgcgccacctcgcaaacccccaactcaggcacttgggccccttttgggccccctctcgctcctccctttaggcacctccctgggcccgcccacggtctccccccagtttgggactgcgtcataagtatcccagacctcggcttgcagtagtgttagactgaagataaagtaagtgctgtttgggctaacaggatctcctcttgcagtctgcagcccaggacgctgattccagcagcgccttaccgcgcagcccgaagattcactatggtgaaaatcgccttcaatacccctaccgccgtgcaaaaggaggaggcgcggcaagacgtggaggccctcctgagccgcacggtcagaactcagatactgaccggcaaggagctccgagttgccacccaggaaaaagagggctcctctgggagatgtatgcttactctcttaggcctttcattcatcttggcaggacttattgttggtggagcctgcatttacaagtacttcatgcccaagagcaccatttaccgtggagagatgtgcttttttgattctgaggatcctgcaaattcccttcgtggaggagagcctaacttcctgcctgtgactgaggaggctgacattcgtgaggatgacaacattgcaatcattgatgtgcctgtccccagtttctctgatagtgaccctgcagcaattattcatgactttgaaaagggaatgactgcttacctggacttgttgctggggaactgctatctgatgcccctcaatacttctattgttatgcctccaaaaaatctggtagagctctttggcaaactggcgagtggcagatatctgcctcaaacttatgtggttcgagaagacctagttgctgtggaggaaattcgtgatgttagtaaccttggcatctttatttaccaactttgcaataacagaaagtccttccgccttcgtcgcagagacctcttgctgggtttcaacaaacgtgccattgataaatgctggaagattagacacttccccaacgaatttattgttgagaccaagatctgtcaagagtaagaggcaacagatagagtgtccttggtaataagaagtcagagatttacaatatgactttaacattaaggtttatgggatactcaagatatttactcatgcatttactctattgcttatgctttaaaaaaaggaaaaaaaaaaactactaaccactgcaagctcttgtcaaattttagtttaattggcattgcttgttttttgaaactgaaattacatgagtttcattttttctttgaatttatagggtttagatttctgaaagcagcatgaatatatcacctaacatcctgacaataaattccatccgttgttttttttgtttgtttgttttttcttttcctttaagtaagctctttattcatcttatggtggagcaattttaaaatttgaaatattttaaattgtttttgaactttttgtgtaaaatatatcagatctcaacattgttggtttcttttgtttttcattttgtacaactttcttgaatttagaaattacatctttgcagttctgttaggtgctctgtaattaacctgacttatatgtgaacaattttcatgagacagtcatttttaactaatgcagtgattctttctcactactatctgtattgtggaatgcacaaaattgtgtaggtgctgaatgctgtaaggagtttaggttgtatgaattctacaaccctataataaattttactctatacaaaaaaaaaaaaaaaaaaaaaaaaaaaaaaaaaaaaaaaaaaaa

SEQ ID NO: 294 - protein, 263 aa, Homo sapiens
MVKIAFNTPTAVQKEEARQDVEALLSRTVRTQILTGKELRVATQEKEGSSGRCMLTLLGLSFILAGLIVGGACIYKYFMPKSTIYRGEMCFFDSEDPANSLRGGEPNFLPVTEEADIREDDNIAIIDVPVPSFSDSDPAAIIHDFEKGMTAYLDLLLGNCYLMPLNTSIVMPPKNLVELFGKLASGRYLPQTYVVREDLVAVEEIRDVSNLGIFIYQLCNNRKSFRLRRRDLLLGFNKRAIDKCWKIRHFPNEFIVETKICQE

SEQ ID NO: 295 - DNA, 3371 bp, Homo sapiens
agcgggttccattcccgggggattggagtagcgttggagtcaccgacgccatcccctcccgcctctggcgtagcaggagcatgcgcttccttcctcacttcctctccaggagggagcgagagtaaagctacgccctggcgcgcagtctccgcgtcacaggaacttcagcacccacagggcggacagcgctcccctctacctggagacttgactcccgcgcgccccaaccctgcttatcccttgaccgtcgagtgtcagagatcctgcagccgcccagtcccggcccctctcccgccccacacccaccctcctggctcttcctgtttttactcctccttttcattcataacaaaagctacagctccaggagcccagcgccgggctgtgacccaagccgagcgtggaagaatggggttcctcgggaccggcacttggattctggtgttagtgctcccgattcaagctttccccaaacctggaggaagccaagacaaatctctacataatagagaattaagtgcagaaagacctttgaatgaacagattgctgaagcagaagaagacaagattaaaaaaacatatcctccagaaaacaagccaggtcagagcaactattcttttgttgataacttgaacctgctaaaggcaataacagaaaaggaaaaaattgagaaagaaagacaatctataagaagctccccacttgataataagttgaatgtggaagatgttgattcaaccaagaatcgaaaactgatcgatgattatgactctactaagagtggattggatcataaatttcaagatgatccagatggtcttcatcaactagacgggactcctttaaccgctgaagacattgtccataaaatcgctgccaggatttatgaagaaaatgacagagccgtgtttgacaagattgtttctaaactacttaatctcggccttatcacagaaagccaagcacatacactggaagatgaagtagcagaggttttacaaaaattaatctcaaaggaagccaacaattatgaggaggatcccaataagcccacaagctggactgagaatcaggctggaaaaataccagagaaagtgactccaatggcagcaattcaagatggtcttgctaagggagaaaacgatgaaacagtatctaacacattaaccttgacaaatggcttggaaaggagaactaaaacctacagtgaagacaactttgaggaactccaatatttcccaaatttctatgcgctactgaaaagtattgattcagaaaaagaagcaaaagagaaagaaacactgattactatcatgaaaacactgattgactttgtgaagatgatggtgaaatatggaacaatatctccagaagaaggtgtttcctaccttgaaaacttggatgaaatgattgctcttcagaccaaaaacaagctagaaaaaaatgctactgacaatataagcaagcttttcccagcaccatcagagaagagtcatgaagaaacagacagtaccaaggaagaagcagctaagatggaaaaggaatatggaagcttgaaggattccacaaaagatgataactccaacccaggaggaaagacagatgaacccaaaggaaaaacagaagcctatttggaagccatcagaaaaaatattgaatggttgaagaaacatgacaaaaagggaaataaagaagattatgacctttcaaagatgagagacttcatcaataaacaagctgatgcttatgtggagaaaggcatccttgacaaggaagaagccgaggccatcaagcgcatttatagcagcctgtaaaaatggcaaaagatccaggagtctttcaactgtttcagaaaacataatatagcttaaaacacttctaattctgtgattaaaattttttgacccaagggttattagaaagtgctgaatttacagtagttaaccttttacaagtggttaaaacatagctttcttcccgtaaaaactatctgaaagtaaagttgtatgtaagctgagattttgtatacagaatccttatttcctcatagacttatattttataatcagaatatgttgctttgaaaaagcctctaatggactgaccttaaaactcatccttcttccactgtctcatccacataagcactccccgaagaattaagggggttctgttttcaaggcatgccaagtactaaagcaccttgcagagcgtgtctattacaagatgtcatttccaccagcagttcccttaggggagctgaaataaattcacattttctcaaagtctcatagctttggaggagccatctgcttttttggctgctctttttagctggctttttattaggctcagtgacataaaaaggatccaggtaaatgggtataggatttgctggatttactaacaatttccccctgttcttaacacttcctattagtgacttttcagacattgagtttacttataaagagagatatttatgtactctctaagaagacaaatgaggtcataaacactgcataaagcaaggcaaaaatgtatgccacatctcagttatctaaactagattagatccaagccaagttttctcaacagagagcaaagggccaggcagtaaggtagaaatagagataaaaatcattccttccttgtgatccaaagctggtcgagcagctttcctggaggaaaaggttaatgaacttcaggtccctgcaactcagcccccaccacaaacacagccctggaaacatacagtggcgcaaggtcctcttgaaatgttaatggttaatgttcccaaaccagagaatgctttgaaaatgtatcattcagtgtaaattaattacatacatatttttctatatatttgtttcaaactgtaaaaataacataatatgtaatttgtgtattagtgagaggtgaagccagctggacttcctgggtcgagtggggccttggagaacttttctgtcttacaagaggattgtaaaatgcacccatcagtgctctgtaaaacacaccaatcagcgctctgtagctagcaataggtttgtaaaatgcacccatcagcactctgtaaaacgcaccaatcagcactctgtaaaatgcaccaatcagcaggattctaaaagtagacaatcacagggaggattgaaaaaaagggcactctgatagggcaaaaacggaacatgggaggggacaaataagggaataaaatctggccaccccagccagcagcagcaacctgttcaggtcgcctgccgctgtggaagctttgtccttttgctcttcataataaaccttgctactgttcaaaaaaaaaaaaaaaaaaaaaaaaaaaaaaaaaaaaaaaaaaaaaaaaaaaaaaaaa

SEQ ID NO: 296 - protein, 468 aa, Homo sapiens
MGFLGTGTWILVLVLPIQAFPKPGGSQDKSLHNRELSAERPLNEQIAEAEEDKIKKTYPPENKPGQSNYSFVDNLNLLKAITEKEKIEKERQSIRSSPLDNKLNVEDVDSTKNRKLIDDYDSTKSGLDHKFQDDPDGLHQLDGTPLTAEDIVHKIAARIYEENDRAVFDKIVSKLLNLGLITESQAHTLEDEVAEVLQKLISKEANNYEEDPNKPTSWTENQAGKIPEKVTPMAAIQDGLAKGENDETVSNTLTLTNGLERRTKTYSEDNFEELQYFPNFYALLKSIDSEKEAKEKETLITIMKTLIDFVKMMVKYGTISPEEGVSYLENLDEMIALQTKNKLEKNATDNISKLFPAPSEKSHEETDSTKEEAAKMEKEYGSLKDSTKDDNSNPGGKTDEPKGKTEAYLEAIRKNIEWLKKHDKKGNKEDYDLSKMRDFINKQADAYVEKGILDKEEAEAIKRIYSSL

SEQ ID NO: 297 - DNA, 2494 bp, Homo sapiens
cacgaggcaggggccattttacctccaggttggccctgctcaggaccaggaggaaacacctccagcccgcgacctcctcccacagggggaaaaggaaagcaggaggaccacagaagctttggcaccgaggatccccgcagtcttcacccgcggagattccggctgaaggagctgtccagcgactacaccgctaagcgcagggagcccaagcctccgcaccggattccggagcacaagctccaccgcgcatgcgcacacgccccagacccaggctcaggaggactgagaattttctgaccgcagtgcaccatgggaagctctgaagtttccataattcctgggctccagaaagaagaaaaggcggccgtggagagacgaagacttcatgtgctgaaagctctgaagaagctaaggattgaggctgatgaggccccagttgttgctgtgctgggctcaggcggaggactgcgggctcacattgcctgccttggggtcctgagtgagatgaaagaacagggcctgttggatgccgtcacgtacctcgcaggggtctctggatccacttgggcaatatcttctctctacaccaatgatggtgacatggaagctctcgaggctgacctgaaacatcgatttacccgacaggagtgggacttggctaagagcctacagaaaaccatccaagcagcgaggtctgagaattactctctgaccgacttctgggcctacatggttatctctaagcaaaccagagaactgccggagtctcatttgtccaatatgaagaagcccgtggaagaagggacactaccctacccaatatttgcagccattgacaatgacctgcaaccttcctggcaggaggcaagagcaccagagacctggttcgagttcacccctcaccacgctggcttctctgcactgggggcctttgtttccataacccacttcggaagcaaattcaagaagggaagactggtcagaactcaccctgagagagacctgactttcctgagaggtttatggggaagtgctcttggtaacactgaagtcattagggaatacatttttgaccagttaaggaatctgaccctgaaaggtttatggagaagggctgttgctaatgctaaaagcattggacaccttatttttgcccgattactgaggctgcaagaaagttcacaaggggaacatcctcccccagaagatgaaggcggtgagcctgaacacacctggctgactgagatgctcgagaattggaccaggacctccctggaaaagcaggagcagccccatgaggaccccgaaaggaaaggctcactcagtaacttgatggattttgtgaagaaaacaggcatttgcgcttcaaagtgggaatgggggaccactcacaacttcctgtacaaacacggtggcatccgggacaagataatgagcagccggaagcacctccacctggtggatgctggtttagccatcaacactcccttcccactcgtgctgcccccgacgcgggaggttcacctcatcctctccttcgacttcagtgccggagatcctttcgagaccatccgggctaccactgactactgccgccgccacaagatcccctttccccaagtagaagaggctgagctggatttgtggtccaaggcccccgccagctgctacatcctgaaaggagaaactggaccagtggtgatacattttcccctgttcaacatagatgcctgtggaggtgatattgaggcatggagtgacacatacgacacattcaagcttgctgacacctacactctagatgtggtggtgctactcttggcattagccaagaagaatgtcagggaaaacaagaagaagatccttagagagttgatgaacgtggccgggctctactacccgaaggatagtgcccgaagttgctgcttggcatagatgagcctcagcttccagggcactgtgggcctgttggtctactagggccctgaagtccacctggccttcctgttcttcactcccttcagccacacgcttcatggccttgagttcaccttggctgtcctaacagggccaatcaccagtgaccagctagactgtgattttgatagcgtcattcagaagaaggtgtccaaggagctgaaggtggtgaaatttgtcctgcaggtccctcgggagatcctggagctggagcatgagtgtctgacaatcagaagcatcatgtccaatgtccagatggccagaatgaatgtgatagttcagaccaatgccttccactgctcctttatgactgcacttctagccagtagctctgcacaagttagctctgtagaagtaagaacttgggcttaaatcatgggctatctctccacagccaagtggagctctgagaatacaacaagtgctcaataaatgcttgctgattgactgatgaaaaaaaaaaaaaaaaaaaaaaaaaaaaaaaaaaaaaaaaaaaaaaaaaaaaaaaaaaaaaaaa

SEQ ID NO: 298 - protein, 541 aa, Homo sapiens
MGSSEVSIIPGLQKEEKAAVERRRLHVLKALKKLRIEADEAPVVAVLGSGGGLRAHIACLGVLSEMKEQGLLDAVTYLAGVSGSTWAISSLYTNDGDMEALEADLKHRFTRQEWDLAKSLQKTIQAARSENYSLTDFWAYMVISKQTRELPESHLSNMKKPVEEGTLPYPIFAAIDNDLQPSWQEARAPETWFEFTPHHAGFSALGAFVSITHFGSKFKKGRLVRTHPERDLTFLRGLWGSALGNTEVIREYIFDQLRNLTLKGLWRRAVANAKSIGHLIFARLLRLQESSQGEHPPPEDEGGEPEHTWLTEMLENWTRTSLEKQEQPHEDPERKGSLSNLMDFVKKTGICASKWEWGTTHNFLYKHGGIRDKIMSSRKHLHLVDAGLAINTPFPLVLPPTREVHLILSFDFSAGDPFETIRATTDYCRRHKIPFPQVEEAELDLWSKAPASCYILKGETGPVVIHFPLFNIDACGGDIEAWSDTYDTFKLADTYTLDVVVLLLALAKKNVRENKKKILRELMNVAGLYYPKDSARSCCLA

SEQ ID NO: 299 - DNA, 3097 bp, Homo sapiens
cccccgagggacatgagagaagaggagcggcgctcaggttattccaggatctttggagacccgaggaaagccgtgttgaccaaaagcaagacaaatgactcacagagaaaaaagatggcagaaccaagggcaactaaagccgtcaggttctgaacagctggtagatgggctggcttactgaaggacatgattcagactgtcccggacccagcagctcatatcaaggaagccttatcagttgtgagtgaggaccagtcgttgtttgagtgtgcctacggaacgccacacctggctaagacagagatgaccgcgtcctcctccagcgactatggacagacttccaagatgagcccacgcgtccctcagcaggattggctgtctcaacccccagccagggtcaccatcaaaatggaatgtaaccctagccaggtgaatggctcaaggaactctcctgatgaatgcagtgtggccaaaggcgggaagatggtgggcagcccagacaccgttgggatgaactacggcagctacatggaggagaagcacatgccacccccaaacatgaccacgaacgagcgcagagttatcgtgccagcagatcctacgctatggagtacagaccatgtgcggcagtggctggagtgggcggtgaaagaatatggccttccagacgtcaacatcttgttattccagaacatcgatgggaaggaactgtgcaagatgaccaaggacgacttccagaggctcacccccagctacaacgccgacatccttctctcacatctccactacctcagagagactcctcttccacatttgacttcagatgatgttgataaagccttacaaaactctccacggttaatgcatgctagaaacacagatttaccatatgagccccccaggagatcagcctggaccggtcacggccaccccacgccccagtcgaaagctgctcaaccatctccttccacagtgcccaaaactgaagaccagcgtcctcagttagatccttatcagattcttggaccaacaagtagccgccttgcaaatccaggcagtggccagatccagctttggcagttcctcctggagctcctgtcggacagctccaactccagctgcatcacctgggaaggcaccaacggggagttcaagatgacggatcccgacgaggtggcccggcgctggggagagcggaagagcaaacccaacatgaactacgataagctcagccgcgccctccgttactactatgacaagaacatcatgaccaaggtccatgggaagcgctacgcctacaagttcgacttccacgggatcgcccaggccctccagccccaccccccggagtcatctctgtacaagtacccctcagacctcccgtacatgggctcctatcacgcccacccacagaagatgaactttgtggcgccccaccctccagccctccccgtgacatcttccagtttttttgctgccccaaacccatactggaattcaccaactgggggtatataccccaacactaggctccccaccagccatatgccttctcatctgggcacttactactaaagacctggcggaggcttttcccatcagcgtgcattcaccagcccatcgccacaaactctatcggagaacatgaatcaaaagtgcctcaagaggaatgaaaaaagctttactggggctggggaaggaagccggggaagagatccaaagactcttgggagggagttactgaagtcttactacagaaatgaggaggatgctaaaaatgtcacgaatatggacatatcatctgtggactgaccttgtaaaagacagtgtatgtagaagcatgaagtcttaaggacaaagtgccaaagaaagtggtcttaagaaatgtataaactttagagtagagtttggaatcccactaatgcaaactgggatgaaactaaagcaatagaaacaacacagttttgacctaacataccgtttataatgccattttaaggaaaactacctgtatttaaaaatagaaacatatcaaaaacaagagaaaagacacgagagagactgtggcccatcaacagacgttgatatgcaactgcatggcatgtgctgttttggttgaaatcaaatacattccgtttgatggacagctgtcagctttctcaaactgtgaagatgacccaaagtttccaactcctttacagtattaccgggactatgaactaaaaggtgggactgaggatgtgtatagagtgagcgtgtgattgtagacagaggggtgaagaaggaggaggaagaggcagagaaggaggagaccaggctgggaaagaaacttctcaagcaatgaagactggactcaggacatttggggactgtgtacaatgagttatggagactcgagggttcatgcagtcagtgttataccaaacccagtgttaggagaaaggacacagcgtaatggagaaagggaagtagtagaattcagaaacaaaaatgcgcatctctttctttgtttgtcaaatgaaaattttaactggaattgtctgatatttaagagaaacattcaggacctcatcattatgtgggggctttgttctccacagggtcaggtaagagatggccttcttggctgccacaatcagaaatcacgcaggcattttgggtaggcggcctccagttttcctttgagtcgcgaacgctgtgcgtttgtcagaatgaagtatacaagtcaatgtttttccccctttttatataataattatataacttatgcatttatacactacgagttgatctcggccagccaaagacacacgacaaaagagacaatcgatataatgtggccttgaattttaactctgtatgcttaatgtttacaatatgaagttattagttcttagaatgcagaatgtatgtaataaaataagcttggcctagcatggcaaatcagatttatacaggagtctgcatttgcactttttttagtgactaaagttgcttaatgaaaacatgtgctgaatgttgtggattttgtgttataatttactttgtccaggaacttgtgcaagggagagccaaggaaataggatgtttggcaccc

SEQ ID NO: 300 - protein, 462 aa, Homo sapiens
MIQTVPDPAAHIKEALSVVSEDQSLFECAYGTPHLAKTEMTASSSSDYGQTSKMSPRVPQQDWLSQPPARVTIKMECNPSQVNGSRNSPDECSVAKGGKMVGSPDTVGMNYGSYMEEKHMPPPNMTTNERRVIVPADPTLWSTDHVRQWLEWAVKEYGLPDVNILLFQNIDGKELCKMTKDDFQRLTPSYNADILLSHLHYLRETPLPHLTSDDVDKALQNSPRLMHARNTDLPYEPPRRSAWTGHGHPTPQSKAAQPSPSTVPKTEDQRPQLDPYQILGPTSSRLANPGSGQIQLWQFLLELLSDSSNSSCITWEGTNGEFKMTDPDEVARRWGERKSKPNMNYDKLSRALRYYYDKNIMTKVHGKRYAYKFDFHGIAQALQPHPPESSLYKYPSDLPYMGSYHAHPQKMNFVAPHPPALPVTSSSFFAAPNPYWNSPTGGIYPNTRLPTSHMPSHLGTYY

SEQ ID NO: 301 - DNA, 4510 bp, Homo sapiens
gctgaggccaggagggcgcactggggattggaggcgagggaagtgcagggcgcatcccaggcggcagggctcccagcatcggcagtcgccatcaccgccagaccgcagagacaggttcggatccgcggtcctcttgcctctttccaggcctcgatgagtgttaaatcgccatttaatgtgatgtcaagaaataatttggaagcacctccttgtaagatgacagagccatttaattttgagaaaaatgaaaacaagcttccaccacatgagtctttaagaagtcctggaacacttcctaaccaccctaatttcaggctgaaaagctcagagaatggaaataaaaagaacaattttttgctttgtgagcaaaccaaacaatatttggctagtcaggaagacaattcagtttcttcaaacccgaatggcatcaacggagaagtagttggctccaaaggagacaggaaaaaattgccagcaggaaactcagtgtcaccaccaagtgctgaaagtaattcaccacccaaagaagtgaatattaagcctggaaataatgtacgtcctgcaaaatcaaaaaaactaaacaagttggtcgagaattccttgtccataagtaatccagggctcttcacctccttaggacctcctcttcggtccacaacttgccatcgctgtggcctatttggatcgctgaggtgctctcagtgcaagcagacctactattgctccacagcatgtcaaagaagagactggtctgcacacagcatcgtgtgcaggcctgttcagccaaatttccacaaacttgaaaataaatcatctattgaaacaaaggatgtggaggtaaacaataagagtgactgtccacttggagttactaaggaaatagccatttgggctgagagaataatgttttctgatttgagaagtctacaactcaagaaaaccatggaaataaagggtacggttaccgaattcaaacacccaggggacttctacgtgcagttatattcttcagaagttttagaatacatgaaccaactctctgccagcttaaaagaaacatatgcaaatgtgcatgaaaaagactatattcctgttaagggggaagtttgtattgccaagtacactgttgatcagacctggaacagagcaatcatacaaaacgttgatgtgcagcaaaagaaggcacatgtcttatatattgattatggaaatgaagaaataattccattaaacagaatttaccacctcaacaggaacattgacttgtttcctccttgtgccataaagtgctttgtagccaatgttatcccagcagaagggaattggagcagtgattgtatcaaagctactaaaccactgttaatggagcagtactgctccataaagattgtcgacatcttggaagaggaagtggttacctttgctgtagaagttgagctgccaaattcaggaaaacttttagaccatgtgcttatagaaatgggatatggcttgaaacccagtggacaagattctaagaaggaaaatgcagatcaaagtgatcctgaagatgttggaaaaatgacaactgaaaacaacattgtcgtagacaaaagtgacctaatcccaaaagtgttaactttgaatgtaggtgatgagttttgtggtgtggttgcccacattcaaacaccagaagacttcttttgtcaacaactgcaaagtggccgaaagcttgctgaacttcaggcatcccttagcaagtactgtgatcagttgcctccacgctctgatttttatccagccattggtgatatatgttgtgctcagttctcagaggatgatcagtggtaccgtgcctctgttttggcttacgcttctgaagaatctgtactggtcggatatgtagattatggaaactttgaaatccttagtttgatgagactttgtcccataatcccaaagttgttggaattgccaatgcaagctataaagtgtgtactagcaggagtaaagccatcattaggaatttggactccagaagctatttgtctcatgaaaaaacttgtacagaacaaaataatcacagtgaaagtggtggacaagttggaaaacagttccctggtggagcttattgataaatccgagacgcctcatgtcagtgttagcaaagttctcctagatgcaggctttgctgtgggagaacagagtatggtgacagataaacccagtgacgtgaaagaaaccagtgttcccttgggtgtggaaggaaaagtaaatccattggagtggacatgggttgaacttggtgttgaccaaacagtagatgttgtggtctgtgtgatatatagtcctggagaattttattgccatgtgcttaaagaggatgctttaaagaaactcaatgatttgaacaagtcattagcagaacactgccagcagaagttacctaatggtttcaaggcagagataggacaaccttgttgtgctttttttgcaggtgatggtagttggtatcgtgctttagtcaaggaaatcttaccaaatggacatgttaaagtacattttgtggattatggaaacatcgaagaagttactgcagatgaactccgaatgatatcatcaacatttttaaaccttccctttcagggaatacggtgccagttagcagatatacagtctagaaacaaacattggtctgaagaagccataacaagattccagatgtgtgttgctgggataaaattgcaagccagagtggttgaagtcactgaaaatgggataggagttgaactcaccgatctctccacttgttatcccagaataattagtgatgttctgattgatgaacatctggttttaaaatctgcttcaccacataaagacttaccaaatgacagacttgttaataaacatgagcttcaagttcatgtacagggacttcaagctacctcttcagctgagcaatggaagacgatagaattgccagtggataaaactatacaagcaaatgtattagaaatcataagcccaaacttgttttatgctctaccaaaagggatgccagaaaatcaggaaaagctgtgcatgttgacagctgaattattagaatactgcaatgctccgaaaagtcgaccaccctatagaccaagaattggagacgcatgctgtgccaaatacacaagtgatgatttttggtatcgtgcagttgttctggggacatcagacactgatgtggaagtgctctatgcagactatggaaacattgaaaccctgcctctttgcagagtgcaaccaatcacctctagccacctggcgcttcctttccaaattattagatgttcacttgaaggattaatggaattgaatggaagctcttctcaattaataataatgctattaaaaaatttcatgttgaatcagaatgtaatgctttctgtgaaaggaattacaaagaatgtccatacagtgtcagttgagaaatgttctgagaatgggactgtcgatgtagctgataagctagtgacatttggtctggcaaaaaacatcacacctcaaaggcagagtgctttaaatacagaaaagatgtataggatgaattgctgctgcacagagttacagaaacaagttgaaaaacatgaacatattcttctcttcctcttaaacaattcaaccaatcaaaataaatttattgaaatgaaaaaactgttaaaaaaaacagcatctcttggaggtaaacccttatgagacaggaaacagcaaaggctagctttaggagagaaagtacagcacctggtgtttttatttatgagaaccttttctttgtccactttctctgtaatgaccttctatccctccgtttttgcctgcctgccattctcctattaggttggtggtttttattttcctctaagttccttccaccaaataaatattacgtaaaaaattcataccaaatcaatgagaatactggcaaggaatacatagggactttctgctatatatgtaactttttattacttaaaggtaccgaaggaaggccaggtgcagtggctcacgcccagcactttgggaggctgaggtgggaggatcccttgaggccaggagttcaaggttacagtgagctatgatagtgccactgcactccagcctgggtgacagattttgtcttaaaaaaaaaaaaaaaaaagttgatatgagttttattttctgtccgtttgaaatattttgtaatattccctgcattctctgtcgtctgcctcttccacataatgtcctttgctttcatgtttgttatcttctttttctgttcactcagaggtcatcaatttctttctctccgtccttaattggattatttttcttttggcctttgggcacagagtctgacctctggaccactctaactggagaaggaactttatgttccctctcctgctgtgtccacaaccttagaaatctgtagctagatttttgttgttatagatagaatttactgtttctgaaacccaaatacagttatcagtttaaggtt

SEQ ID NO: 302 - protein, 1189 aa, Homo sapiens
MSVKSPFNVMSRNNLEAPPCKMTEPFNFEKNENKLPPHESLRSPGTLPNHPNFRLKSSENGNKKNNFLLCEQTKQYLASQEDNSVSSNPNGINGEVVGSKGDRKKLPAGNSVSPPSAESNSPPKEVNIKPGNNVRPAKSKKLNKLVENSLSISNPGLFTSLGPPLRSTTCHRCGLFGSLRCSQCKQTYYCSTACQRRDWSAHSIVCRPVQPNFHKLENKSSIETKDVEVNNKSDCPLGVTKEIAIWAERIMFSDLRSLQLKKTMEIKGTVTEFKHPGDFYVQLYSSEVLEYMNQLSASLKETYANVHEKDYIPVKGEVCIAKYTVDQTWNRAIIQNVDVQQKKAHVLYIDYGNEEIIPLNRIYHLNRNIDLFPPCAIKCFVANVIPAEGNWSSDCIKATKPLLMEQYCSIKIVDILEEEVVTFAVEVELPNSGKLLDHVLIEMGYGLKPSGQDSKKENADQSDPEDVGKMTTENNIVVDKSDLIPKVLTLNVGDEFCGVVAHIQTPEDFFCQQLQSGRKLAELQASLSKYCDQLPPRSDFYPAIGDICCAQFSEDDQWYRASVLAYASEESVLVGYVDYGNFEILSLMRLCPIIPKLLELPMQAIKCVLAGVKPSLGIWTPEAICLMKKLVQNKIITVKVVDKLENSSLVELIDKSETPHVSVSKVLLDAGFAVGEQSMVTDKPSDVKETSVPLGVEGKVNPLEWTWVELGVDQTVDVVVCVIYSPGEFYCHVLKEDALKKLNDLNKSLAEHCQQKLPNGFKAEIGQPCCAFFAGDGSWYRALVKEILPNGHVKVHFVDYGNIEEVTADELRMISSTFLNLPFQGIRCQLADIQSRNKHWSEEAITRFQMCVAGIKLQARVVEVTENGIGVELTDLSTCYPRIISDVLIDEHLVLKSASPHKDLPNDRLVNKHELQVHVQGLQATSSAEQWKTIELPVDKTIQANVLEIISPNLFYALPKGMPENQEKLCMLTAELLEYCNAPKSRPPYRPRIGDACCAKYTSDDFWYRAVVLGTSDTDVEVLYADYGNIETLPLCRVQPITSSHLALPFQIIRCSLEGLMELNGSSSQLIIMLLKNFMLNQNVMLSVKGITKNVHTVSVEKCSENGTVDVADKLVTFGLAKNITPQRQSALNTEKMYRMNCCCTELQKQVEKHEHILLFLLNNSTNQNKFIEMKKLLKKTASLGGKPL

SEQ ID NO: 303 - DNA, 21 bp, Artificial Sequence
  Synthesized Oligonucleotide.
cacagugcauacggggcuctt

SEQ ID NO: 304 - DNA, 21 bp, Artificial Sequence
  Synthesized Oligonucleotide.
cuccacggugaagguguagtt

SEQ ID NO: 305 - DNA, 2158 bp, Homo sapiens
cggattgtcagactgctcctccctcttctttagactgccacgaggaaaaagcagatgtgagaactcaaggttcagggctgctcttctaagaaacaagtctgccataatctccatctgtgttggaatctgttaactaatgaactggtctctgtgcaaatcctgagtgctaaagcttccaacaagactgatgctagctcgtgtcaccaggaagatgctacgtcatgccaagtgttttcagcgcctagcaatttttggttctgtgagggcactgcataaagataatagaacagcaacccctcagaatttctccaactatgaatccatgaaacaggacttcaaactggggattccagagtatttcaactttgctaaagatgtcctggaccaatggactgataaggaaaaggctggaaagaaaccttcaaatccagccttctggtggatcaacagaaatggagaagagatgcgatggagttttgaggaactgggatctctgtccagaaaatttgccaatatactttcagaagcctgttccctacaaagaggagatcgggtaattctgattctgcccagggtcccagagtggtggcttgcaaatgtggcctgtctgcgaacagggacagttttaattccaggaaccactcagctgacccagaaagacattctctacagactacaatcttcaaaagcaaactgcattatcaccaatgatgttttagccccagcagtagacgctgttgcatccaaatgtgaaaatctgcactccaagctgattgtatcagagaactccagagaggggtgggggaacctcaaggagttgatgaaacatgccagtgacagccacacctgtgtgaagacaaaacacaatgagatcatggccatattctttaccagtggaacaagtggatatccgaaaatgactgcacacacccacagcagttttggtttaggattatctgtaaatggaaggttctggctagatttgacaccctcagatgtgatgtggaatacctcagatacgggctgggcaaagtctgcatggagtagtgttttttctccgtggatccagggagcatgtgtattcacacaccatttaccccgttttgagccgacttctatcttgcaaacactctccaagtaccccatcacagtcttctgttcagcaccaactgtataccgaatgcttgtacagaatgatataaccagctataagtttaaaagcttaaagcactgtgtgagtgctggggaaccaattacccctgacgtgactgaaaaatggagaaacaagacgggcctggatatctacgaaggatatggacagactgaaacggtgctaatctgtggaaattttaagggaatgaaaattaaacctggctcaatgggaaaaccttctcctgctttcgatgttaagattgtagatgtaaatggcaatgttctacctcctggacaagaaggagatattggcattcaagttctacccaaccgaccatttggcctttttactcattacgtagataatccttcaaaaacagcttcaactctacgaggcaatttctatatcactggggacagaggatatatggataaagatgggtatttctggtttgttgcaagagcagatgatgtcatattatcctctggctatcgaattggaccatttgaggtagaaaatgccctgaatgaacacccttcagttgcagagtcagctgttgtcagcagcccagaccccatcagaggagaggtagtaaaggcttttgtcgttctaaatcctgattacaagtcacatgatcaagaacaactaataaaggagattcaggagcatgttaaaaaaactacagcaccttacaaatatcccagaaaggtagaatttattcaagagctgccaaagactatcagtgggaagacaaaaagaaatgaactgaggaagaaagaatggaagacaatttaaagttgtttcattaattaccatatctataaaacaaacatagtatctgtcaatctctagaaaccacaagatgatggagaggtcataaaaactgtggtagtatgcttagaaactgttgatttaaaatatcttgtggttatgatatcagaggctaaattttgaaataaaatatttggcaaattcctccaaaaaaaaaaaaaaaaaaaaaaaaaa

SEQ ID NO: 306 - protein, 586 aa, Homo sapiens
MLARVTRKMLRHAKCFQRLAIFGSVRALHKDNRTATPQNFSNYESMKQDFKLGIPEYFNFAKDVLDQWTDKEKAGKKPSNPAFWWINRNGEEMRWSFEELGSLSRKFANILSEACSLQRGDRVILILPRVPEWWLANVACLRTGTVLIPGTTQLTQKDILYRLQSSKANCIITNDVLAPAVDAVASKCENLHSKLIVSENSREGWGNLKELMKHASDSHTCVKTKHNEIMAIFFTSGTSGYPKMTAHTHSSFGLGLSVNGRFWLDLTPSDVMWNTSDTGWAKSAWSSVFSPWIQGACVFTHHLPRFEPTSILQTLSKYPITVFCSAPTVYRMLVQNDITSYKFKSLKHCVSAGEPITPDVTEKWRNKTGLDIYEGYGQTETVLICGNFKGMKIKPGSMGKPSPAFDVKIVDVNGNVLPPGQEGDIGIQVLPNRPFGLFTHYVDNPSKTASTLRGNFYITGDRGYMDKDGYFWFVARADDVILSSGYRIGPFEVENALNEHPSVAESAVVSSPDPIRGEVVKAFVVLNPDYKSHDQEQLIKEIQEHVKKTTAPYKYPRKVEFIQELPKTISGKTKRNELRKKEWKTI

SEQ ID NO: 307 - DNA, 2116 bp, Homo sapiens
atcagaaccaaattgctgagccagtcacctgtgttccaggagccgaatcagaaatgtcatcctcaggcacgccagacttacctgtcctactcaccgatttgaagattcaatatactaagatcttcataaacaatgaatggcatgattcagtgagtggcaagaaatttcctgtctttaatcctgcaactgaggaggagctctgccaggtagaagaaggagataaggaggatgttgacaaggcagtgaaggccgcaagacaggcttttcagattggatccccgtggcgtactatggatgcttccgagagggggcgactattatacaagttggctgatttaatcgaaagagatcgtctgctgctggcgacaatggagtcaatgaatggtggaaaactctattccaatgcatatctgaatgatttagcaggctgcatcaaaacattgcgctactgtgcaggttgggctgacaagatccagggccgtacaataccaattgatggaaatttttttacatatacaagacatgaacctattggtgtatgtggccaaatcattccttggaatttcccgttggttatgctcatttggaagatagggcctgcactgagctgtggaaacacagtggttgtcaaaccagcagagcaaactcctctcactgctctccacgtggcatctttaataaaagaggcagggtttcctcctggagtagtgaatattgttcctggttatgggcctacagcaggggcagccatttcttctcacatggatatagacaaagtagccttcacaggatcaacagaggttggcaagttgatcaaagaagctgccgggaaaagcaatctgaagagggtgaccctggagcttggaggaaagagcccttgcattgtgttagctgatgccgacttggacaatgctgttgaatttgcacaccatggggtattctaccaccagggccagtgttgtatagccgcatccaggatttttgtggaagaatcaatttatgatgagtttgttcgaaggagtgttgagcgggctaagaagtatatccttggaaatcctctgaccccaggagtcactcaaggccctcagattgacaaggaacaatatgataaaatacttgacctcattgagagtgggaagaaagaaggggccaaactggaatgtggaggaggcccgtgggggaataaaggctactttgtccagcccacagtgttctctaatgttacagatgagatgcgcattgccaaagaggagatttttggaccagtgcagcaaatcatgaagtttaaatctttagatgacgtgatcaaaagagcaaacaatactttctatggcttatcagcaggagtgtttaccaaagacattgataaagccataacaatctcctctgctctgcaggcaggaacagtgtgggtgaattgctatggcgtggtaagtgcccagtgcccctttggtggattcaagatgtctggaaatggaagagaactgggagagtacggtttccatgaatatacagaggtcaaaacagtcacagtgaaaatctctcagaagaactcataaagaaaatacaagagtggagagaagctcttcaatagctaagcatctccttacagtcactaatatagtagattttaaagacaaaatttttcttttcttgatttttttaaacataagctaaatcatattagtattaatactacccatagaaaacttgacatgtagcttcttctgaaagaattatttgccttctgaaatgtgacccccaagtcctatcctaaataaaaaaagacaaattcggatgtatgatctctctagctttgtcatagttatgtgattttcctttgtagctacttttgcaggataataattttatagaaaaggaacagttgcatttagcttctttcccttagtgactcttgaagtacttaacatacacgttaactgcagagtaaattgctctgttcccagtagttataaagtccttggactgttttgaaaagtttcctaggatgtcatgtctgcttgtcaaaagaaataatccctgtaatatttagctgtaaactgaatataaagcttaataaaaacaaccttgcatgaaaaaaaaaaaaaaaaaaaaa

SEQ ID NO: 308 - protein, 501 aa, Homo sapiens
MSSSGTPDLPVLLTDLKIQYTKIFINNEWHDSVSGKKFPVFNPATEEELCQVEEGDKEDVDKAVKAARQAFQIGSPWRTMDASERGRLLYKLADLIERDRLLLATMESMNGGKLYSNAYLNDLAGCIKTLRYCAGWADKIQGRTIPIDGNFFTYTRHEPIGVCGQIIPWNFPLVMLIWKIGPALSCGNTVVVKPAEQTPLTALHVASLIKEAGFPPGVVNIVPGYGPTAGAAISSHMDIDKVAFTGSTEVGKLIKEAAGKSNLKRVTLELGGKSPCIVLADADLDNAVEFAHHGVFYHQGQCCIAASRIFVEESIYDEFVRRSVERAKKYILGNPLTPGVTQGPQIDKEQYDKILDLIESGKKEGAKLECGGGPWGNKGYFVQPTVFSNVTDEMRIAKEEIFGPVQQIMKFKSLDDVIKRANNTFYGLSAGVFTKDIDKAITISSALQAGTVWVNCYGVVSAQCPFGGFKMSGNGRELGEYGFHEYTEVKTVTVKISQKNS

SEQ ID NO: 309 - DNA, 6540 bp, Homo sapiens
tgctgatcgctcgtgccggtgcggccgttaaccgcccttgccggagccctaggctcaaaagcagccccttacccttcctgggcttcccccaacccctttcccggtctgccctggggcatgagcagcgatggccggctgcatccctgaggagaaaacttaccggcgcttcctggagctattcctgggcgagtttcgcggaccgtgcggcggcggcgagccggagccggaacccgaacccgaacccgaacccgaacccgagtccgagcccgagcccgaacctgaactggtagaagctgaggcggccgaggcttcggtagaggaacccggggaggaggcggccacggtagccgcgacggaggagggggaccaggagcaagacccggagcccgaggaggaggcggcggttgagggtgaggaggaggaggagggcgcggcgacggcggcggcagccccggggcactcggccgtgccgccgccgccgccccagctgccgcctttgcccccgctcccgcgaccgctgtcagagcgcatcacccgcgaggaggtggagggcgaaagcctggacctgtgcctgcagcagctctacaaatataattgcccttcctttttggctgctgctttagccagagccacatcagatgaagtccttcagagtgatctttctgcacattatatcccaaaggaaacggatggcacagaagggactgtggagattgagacagtgaaattggcccgttctgtcttcagcaaactacacgagatttgctgcagctgggtgaaagacttccccctccgcaggagaccccagctttattatgagacatcaatccatgccatcaaaaacatgcgcaggaaaatggaggacaaacatgtctgcattcctgactttaatatgctcttcaacctagaggaccaggaagaacaagcttactttgcagtgtttgatggccatgggggagtagatgctgctatttatgcctccattcacctccacgttaacttagtccgccaggagatgttcccccatgatcctgctgaggccctgtgcagggccttccgggtcactgatgagcggtttgtgcagaaagcagccagggagagcttaagatgtgggaccacaggagtggtgactttcatcagaggcaacatgctacatgtggcctgggtgggtgattcccaggttatgcttgtgagaaagggccaagctgttgaactaatgaagccacacaaaccagacagagaggatgaaaagcagagaattgaggcccttggaggttgcgtagtctggtttggtgcctggagggtgaatggaagtctgtcggtttccagagctattggagatgctgaacataagccatatatctgtggggatgcagattctgcctccactgttctggatgggaccgaagactacctcattctggcctgtgatggcttctatgacaccgtgaaccctgatgaggcagtgaaagttgtgtccgaccacctgaaagagaataatggagacagcagcatggttgcccacaaattagtggcatcagctcgtgatgctgggtcaagtgataacatcacggttattgtggtattcctgagggacatgaacaaagctgtaaatgttagtgaggaatcagattggacagagaactcttttcaaggagggcaagaagatggtggggatgataaggagaatcatggagagtgcaaacgcccttggcctcagcaccagtgctcagcaccagccgacctaggctatgatgggcgtgtggattcattcactgatagaactagcctgagcccagggtcccaaatcaacgtgctggaagacccaggctacctagatctcacacaaatagaagcaagcaaacctcacagtgcccagtttttgctaccagttgagatgtttggtcctggtgcaccaaagaaagcaaatcttattaatgagttaatgatggagaaaaaatcagttcagtcatcattgcctgaatggagtggtgctggagagtttcccactgctttcaatttgggttcaacaggggagcagatatacagaatgcagagcttgtctcctgtctgttcagggttggaaaatgaacagttcaaatccccgggaaacagagtttctagattgtctcatttacgccaccactactcaaagaagtggcacagattcaggtttaatccaaagttttattcatttctctctgctcaagagccttcccacaaaataggcactagcctgtcctcacttactggaagtgggaagagaaataggataagaagttctctgccatggaggcaaaatagttggaaagggtacagtgaaaacatgaggaagctcagaaagactcatgatattccatgcccagatcttccttggagctataaaatagaataatttttctttcaagtaggttagctagctctcccccaataaaaataccactatcagagtagaaacaaggtagacatttctaaaacatatgtgcttcattatgaatccatggatggctcaattcttaaatgtaaatagatctctaggaaactcaaagtacagtgttttcaatctaaaaagaagtattggcagtttcacttgcaaaattacacagctggtccctgtgatgtgtctcgacaccaatacacaacccccttcccaccatccttcatgtcactagatacacaacccccttcccaccatcccttcagtcactagtggaagctttcaagttagttatttcagtcaggatatacagtgttgaaatctcaatgcagttgaaatctggtctgatgtgcctaatttatctgtggaaaatttaatgctgaattacatttggttgggaaatgtccctcaaaatcctgggcactatgaaggaaccccctgccccctcacctttttgggtaggtaaaagactaaaagccatatggattttaactgataacaatgaaagtggtaaatcagtgtaaaagtgtcatattctcagacttgtgaggcggtttatagtcagaaagatttacggatttttttcctgtaacataaaagattgtgaactttttttaattaaaaaatatttcctagggctgtagttatttgggagtttcataacctgttatggtgcttttggtggaaatttttattatttagcattttaggagaccgctgtcaactggttttaatctatgatgctaatgtgttttccactgtaccctcatctcaggaataaaactgctttaacggagatgatgtcaggtacaaatacactatagagtcaaaataccatttacaaagaaaatcaaaagcatttctatattttgtctttttttagttcagacagcaaaggcatgtactactataaaatacaaagtgattttagagaatgaaaaatgctacttttatcttctctaaaattatttcccccaaggtagtgaagtaattggaatgaaggaggctgaaagtattgtctaaagtgagcccagaggccactgagaatgcagattactgacagccaggtctgtttagttgtaattggaagacacatgagtgtcctgcttacatgtagcttcagactgcagagacaggacgtgtgcttttcatttcaatatttagttatatttgatattttgaaactgtctgctttttgctatttctgcagtttcaagttagttagaagcatgttgtcaactaaagacaacaaactatcagattcattcattcagtgaagcagcctctgattctctaagagtcacgaatgtcttagtgttaccctcccctagtcaacagcagaccagcctggccaatgcctatgggtggcccctctggagtgctcactaacaagggtgagtgctctcgctaagaagtgtcccccgcctaatcatgtgtttataggatagtacacgttccccaggcccataacagaggactaaaatctctgaattttaaagacacagatgactggcatattttggataccagtatagctatatcaaatagacaaaaacagcttcactttagcaatgatcagattgttaatctacagattttattttttaaaatttggatgtaagtagagactttcagtatttgttttctcttgattttgaagtcatttcttcttctcacgtctgtgacaaatggttgaaaaggagtcaacatggccccaactatagtgccggaaccttttcatcattctgaggctttgccccacacatggtcctcactcatatctgtcaccttctgaagcctagatcttgttaacccatcaggtgcagtgtcagtttcaaatcaaattatctaagaaaacaagaaaacaaaggcagcagactattggtacacattatagtccaaagtgcttagcgaagtaaaaaaaaaagctttttaaaatttctattgttgtctattggtaatgtttttgatcagaataaagagggtaaagggaaaaagttactacacatgctaggctttctcagtggggaaaaaaatggctggatagaactgggacaaacacagacccatctttaggggtctggattttgtaggtccgactacacagcagtgttaactcatttctcatgccattagctctctacaaaataaagcaaagtagttctagtgtggtcgttataaaccaatattgtgaaaaatagcaactattcatttgttcacaacatgcgtatttatagagtagttaggtaccatttgtaaggtaaatcctttaaaattctataatacatactaaaatagtggttattggtctgatatatgctgctcttggttctataaactagataaaagcagtgctttgtgaaatgcagtgttctctcttaacgccactggtgataggaagtagttcccttcagttcaaatcctgtgcccttatttgctgcttgctgacgtaagcaataagtaaccctctaactaatggtatctacatatttctgtaacttgtatttaatgatggtgtacctggtgattgtaaaaatattagacagatataaaagtatctatataatatctataaactgttaatgctgaggtatagtctgtgaattatgtgttttgtatttttattcattgtgtaatttagtggtggtgaaagttctacactcaatccttaaagagtggcagtatccctttttcaatttaacatggtctgcatcaatctgtttgcctgctaaacaagttagaataggaaatagtaaaataaatccaaacaagagtgtaatattggttagggaaacaaacttcaggtcaccaactgaagtcattacaaactccttgtacattcactgtgagtttcaaagggagtcagtccctaatttacaggtttcctttgttcactttctagatgtgtacttttgagggacatgaggttaggcaacattacagcaacacacactggggctattaatcccatttaggtctgtactaaagaggatgggtagaaacacatatgtatataccttttctttacctagaagtgccatccattgtccttgaattattatgattaaagttactgttgcatttaggaggctccttgaaagtaacaccttttccaaggacaatggcaacaatgtcaatgtcaacactgagtctaattttgaccacatttatagtggtatagtgtcaatactgcattttcatgacaaccacactccactgttgaaacactgtgccagtgagaagtgcaacatccagtgggcagatgaaaatgatgcatggccaagttcagtgtttacagataaaactgctgtggttcaagtgcttccttccccatcaaatccttgataaggctttgtgggaaaatgatctaaattattgttttaatttttaaacctaatttattcactcagtgaacattcttacctaagcaaggctataaaagggaatactacagttttgtccacactttaatttgagaccatttttctttgaatcgtaagttagcaaaagaaatttttttcacctttgaaaatcacgtgatgttaaaggacaaatgcccactcttctattctgatctgcaaatagcttaaatgtctcttgcaaaacaaagtaagataccaccagtattacaacacaatgattttccagacaaatggtatggtgttgaaaaataactgttacttcttaaagcagcattttatcttctattttgaagactatttattgtaataattagaaaacatgaaatagggaactccagactgacacagcagttgtttttgaaaaggaaataaactttgatgaattagataatccagatacatcattgtaaactcttactctaggtgctctttggtgagagacaggctttgttctcttgttcataacatttctctgcaaagaattctctatggagtgaagcgaatgaagtgaataatttcttaccaaataaatttatcaatttacaaatctgctctacatctcacttttgagttcagttgtagtcatgagtgatccttcatattttattaaaagtgttcattcaggtaaggtgtatgttgaaattttgccaattatcttaataaaacctggcaatttaaaaa

SEQ ID NO: 310 - protein, 755 aa, Homo sapiens
MAGCIPEEKTYRRFLELFLGEFRGPCGGGEPEPEPEPEPEPEPESEPEPEPELVEAEAAEASVEEPGEEAATVAATEEGDQEQDPEPEEEAAVEGEEEEEGAATAAAAPGHSAVPPPPPQLPPLPPLPRPLSERITREEVEGESLDLCLQQLYKYNCPSFLAAALARATSDEVLQSDLSAHYIPKETDGTEGTVEIETVKLARSVFSKLHEICCSWVKDFPLRRRPQLYYETSIHAIKNMRRKMEDKHVCIPDFNMLFNLEDQEEQAYFAVFDGHGGVDAAIYASIHLHVNLVRQEMFPHDPAEALCRAFRVTDERFVQKAARESLRCGTTGVVTFIRGNMLHVAWVGDSQVMLVRKGQAVELMKPHKPDREDEKQRIEALGGCVVWFGAWRVNGSLSVSRAIGDAEHKPYICGDADSASTVLDGTEDYLILACDGFYDTVNPDEAVKVVSDHLKENNGDSSMVAHKLVASARDAGSSDNITVIVVFLRDMNKAVNVSEESDWTENSFQGGQEDGGDDKENHGECKRPWPQHQCSAPADLGYDGRVDSFTDRTSLSPGSQINVLEDPGYLDLTQIEASKPHSAQFLLPVEMFGPGAPKKANLINELMMEKKSVQSSLPEWSGAGEFPTAFNLGSTGEQIYRMQSLSPVCSGLENEQFKSPGNRVSRLSHLRHHYSKKWHRFRFNPKFYSFLSAQEPSHKIGTSLSSLTGSGKRNRIRSSLPWRQNSWKGYSENMRKLRKTHDIPCPDLPWSYKIE

SEQ ID NO: 311 - DNA, 1453 bp, Homo sapiens
ggccacgaaggccggcccccaccccgggacccccgccgtccccgggccggccggccggtgggcacgatgagccaggtgctggggaagccgcagccgcaggacgaggacgacgcggaggaggaggaggaggaggatgagctggtggggctagcggactacggagacgggcccgactcctccgacgccgatccggacagcggcacagaggagggagttctggacttcagtgaccccttcagcactgaagtgaagccgagaatcctgctcatgggcctgaggagaagcggcaagtcgtctattcagaaagttgtctttcacaaaatgtctcccaacgaaactctgttcttggagagcactaataagatatgccgggaagatgtttccaacagctcctttgtcaattttcagatttgggacttcccaggacagattgacttttttgaccctacatttgactatgagatgatcttccggggaacaggagcactgatatttgtcattgactcacaggatgattacatggaagccctggccaggctccacctcacggtgaccagggcctacaaagtgaatactgacatcaacttcgaggtgtttattcataaagtggatggtctgtcagatgaccacaaaattgaaacccaaagagatattcaccagagggcaaacgatgaccttgcagatgctggattagaaaaaattcacctcagcttttatctgacaagcatatatgatcattcaatatttgaagcttttagcaaagttgttcagaaactgattccacaactcccaactctggagaatttgctgaacatctttatctcaaattctggaattgaaaaggcatttctatttgatgtggtcagtaaaatttatattgcaactgatagtactccggtggatatgcaaacctatgagctctgctgtgatatgatagatgtggttattgacatctcttgtatttatggtctcaaagaagatggagcaggaaccccctatgacaaggaatccacagccatcataaagcttaataatacaaccgtgctttatttaaaagaggtgacaaagttcctggctctcgtttgctttgtcagagaggaaagctttgaaagaaaagggctaattgactataattttcattgcttccggaaggccattcatgaagtttttgaggtgagaatgaaagtagtaaaatctcgaaaggttcagaatcggctgcagaagaaaaagagagccacccctaatgggacccctagagtgctgctgtaggtgaggtttcaggaatgtcttttgaaatcagaccttatccatgaggctgctgcgccatgttgcactaaaggaagaggaagaaggagattgggacacataccattgatttgttgttaaaaaaaaaaaaattcctgcaaccctcttgatcttctcttttataattaaagtcagcacttgaagcggg

SEQ ID NO: 312 - protein, 400 aa, Homo sapiens
MSQVLGKPQPQDEDDAEEEEEEDELVGLADYGDGPDSSDADPDSGTEEGVLDFSDPFSTEVKPRILLMGLRRSGKSSIQKVVFHKMSPNETLFLESTNKICREDVSNSSFVNFQIWDFPGQIDFFDPTFDYEMIFRGTGALIFVIDSQDDYMEALARLHLTVTRAYKVNTDINFEVFIHKVDGLSDDHKIETQRDIHQRANDDLADAGLEKIHLSFYLTSIYDHSIFEAFSKVVQKLIPQLPTLENLLNIFISNSGIEKAFLFDVVSKIYIATDSTPVDMQTYELCCDMIDVVIDISCIYGLKEDGAGTPYDKESTAIIKLNNTTVLYLKEVTKFLALVCFVREESFERKGLIDYNFHCFRKAIHEVFEVRMKVVKSRKVQNRLQKKKRATPNGTPRVLL

SEQ ID NO: 313 - DNA, 2769 bp, Homo sapiens
aagacgctcagaggattctgacaatatctttaccggagaagaggcaaagtacgctcaaagccgaagccacagctcctcctgccgcatttctttcctgcttgcgaattccaagctgttaaataagatgtgcaaagggcttgcaggtctgccggcttcttgcttgaggagtgcaaaagatatgaaacatcggctaggtttcctgctgcaaaaatctgattcctgtgaacacaattcttcccacaacaagaaggacaaagtggttatttgccagagagtgagccaagaggaagtcaagaaatgggctgaatcactggaaaacctgattagtcatgaatgtgggctggcagctttcaaagctttcttgaagtctgaatatagtgaggagaatattgacttctggatcagctgtgaagagtacaagaaaatcaaatcaccatctaaactaagtcccaaggccaaaaagatctataatgaattcatctcagtccaggcaaccaaagaggtgaacctggattcttgcaccagggaagagacaagccggaacatgctagagcctacaataacctgctttgatgaggcccagaagaagattttcaacctgatggagaaggattcctaccgccgcttcctcaagtctcgattctatcttgatttggtcaacccgtccagctgtggggcagaaaagcagaaaggagccaagagttcagcagactgtgcttccctggtccctcagtgtgcctaattctcacctgaaggcagagggatgaaatgccaagactctatgctctggaaaacctgaggccaaatattgatctgtattaagctccagtgctttatccacattgtagcctaatattcatgctgcctgccatgtgtgagtcacttctacgcataaactagatatagcttttggtgtttgagtgttcatcagggtgggaccccattccagtccaattttcctaagtttctttgagggttccatgggagcaaatatctaaataatggcctggtaggtctggattttcaaagattgttggcagtttcctcctcccaacagttttacctcgggatggttggttagtgcatgtcacatgacatccacatgcacatgtattctgttggccagcacgttctccagactctagatgtttagatgaggttgagctatgatatgtgcttgtgtgtatgtctatgtgtatatattatatatacattagacacacatatacattatttctgtatatagatgtctgtgtatacatatgtatgtgtgagtgtatgtacacacacacacacacacacacacacttttgcaagagtgatgggaaagaccctaggtgctcataactagagtatgtgtatgtacttacatgggtgttttgatctctgttctttcatactacatttgaacagggcaaaatgaactaactgccatgtaggctaagaaagaaatgctaacctgtggaaagttggttttgtaaaattccatggatcttgctggagaagcatccaaggaacttcatgcttgatttgaccactgacagcctccaccttgagcactattctaaggagcaaataccttagctcccttgagctggttttctctgatggcacttttgagctcctaagctgccagccttcccttcttttcctgggtgctcagggcatgcttattagcagctgggttggtatggagttggcagacaggatgttcaacttaatgaagaaatacagctaaggccttgccagcaacacctgccgtaagttactggctgagtgagggcatagaagttaaaggttactgtttttatcctctatccttttttcctttcctgatcaaggtgctcttctcattttttcctgagaaccttagccatcagatgaggctccttagtttattgtggttggttgttttttctttataatggctctgggctatatgcccatatttataaaccagcagcaggggaaagattatattttataagagggaacaaattttcacaatttgaaaagcccacataagttttctcttttaaggtagaatcttgttaatttcattccaaacatcggggctaacagagactggaggcatttctttttaggctctgagactaaatgagaggaaaagaaaagaaaaaaaaatgattgtctaaccaattgtgagaattactgtttgaaacttttcaaggcacattgaaatacttgaaaacttctcatttatgttatttatgatgttattttgtacgtgttattattattatattgttttataaatggaggtacaggatatcacctgaattattaatgaatgcccaggaagtaattttcttctcattcttctaaaactactgcctttcaaagtgcacacacacgcgtccacatacactgcattcgttgctccagtataaattacatgcatgagcacctttctggcttttaagccaatataatgggctgcaaaatgaagacaccagagtgtatgcatacaaatctcactgtattaaagatgcaggttttctaattgtacccttcttgtctctctggcaatcttgcccttaatatccctggagttcctcatcagtgtcattttctgttatacacagttccacaattttgtctctagttgacttcaaatgtgtaactttattggtcttgccctattataattgtcatgactttcagattgtatctgaactcacagactgctgtcttactaataggtctggaaggtcacgctgaatgagaagtaaattattttatgtaaaa

SEQ ID NO: 314 - protein, 205 aa, Homo sapiens
MCKGLAGLPASCLRSAKDMKHRLGFLLQKSDSCEHNSSHNKKDKVVICQRVSQEEVKKWAESLENLISHECGLAAFKAFLKSEYSEENIDFWISCEEYKKIKSPSKLSPKAKKIYNEFISVQATKEVNLDSCTREETSRNMLEPTITCFDEAQKKIFNLMEKDSYRRFLKSRFYLDLVNPSSCGAEKQKGAKSSADCASLVPQCA

SEQ ID NO: 315 - DNA, 3695 bp, Homo sapiens
gccccgtcccggcctcgcgcacctgctcaggccatgatgagcttcggcggcgcggacgcgctgctgggcgccccgttcgcgccgctgcatggcggcggcagcctccactacgcgctagcccgaaagggtggcgcaggcgggacgcgctccgccgctggctcctccagcggcttccactcgtggacacggacgtccgtgagctccgtgtccgcctcgcccagccgcttccgtggcgcaggcgccgcctcaagcaccgactcgctggacacgctgagcaacgggccggagggctgcatggtggcggtggccacctcacgcagtgagaaggagcagctgcaggcgctgaacgaccgcttcgccgggtacatcgacaaggtgcggcagctggaggcgcacaaccgcagcctggagggcgaggctgcggcgctgcggcagcagcaggcgggccgctccgctatgggcgagctgtacgagcgcgaggtccgcgagatgcgcggcgcggtgctgcgcctgggcgcggcgcgcggtcagctacgcctggagcaggagcacctgctcgaggacatcgcgcacgtgcgccagcgcctagacgacgaggcccggcagcgagaggaggccgaggcggcggcccgcgcgctggcgcgcttcgcgcaggaggccgaggcggcgcgcgtggacctgcagaagaaggcgcaggcgctgcaggaggagtgcggctacctgcggcgccaccaccaggaagaggtgggcgagctgctcggccagatccagggctccggcgccgcgcaggcgcagatgcaggccgagacgcgcgacgccctgaagtgcgacgtgacgtcggcgctgcgcgagattcgcgcgcagcttgaaggccacgcggtgcagagcacgctgcagtccgaggagtggttccgagtgaggctggaccgactgtcggaggcagccaaggtgaacacagacgctatgcgctcagcgcaggaggagataactgagtaccggcgtcagctgcaggccaggaccacagagctggaggcactgaaaagcaccaaggactcactggagaggcagcgctctgagctggaggaccgtcatcaggccgacattgcctcctaccaggaagccattcagcagctggacgctgagctgaggaacaccaagtgggagatggccgcccagctgcgagaataccaggacctgctcaatgtcaagatggctctggatatagagatagccgcttacagaaaactcctggaaggtgaagagtgtcggattggctttggcccaattcctttctcgcttccagaaggactccccaaaattccctctgtgtccactcacataaaggtgaaaagcgaagagaagatcaaagtggtggagaagtctgagaaagaaactgtgattgtggaggaacagacagaggagacccaagtgactgaagaagtgactgaagaagaggagaaagaggccaaagaggaggagggcaaggaggaagaagggggtgaagaagaggaggcagaagggggagaagaagaaacaaagtctcccccagcagaagaggctgcatccccagagaaggaagccaagtcaccagtaaaggaagaggcaaagtcaccggctgaggccaagtccccagagaaggaggaagcaaaatccccagccgaagtcaagtcccctgagaaggccaagtctccagcaaaggaagaggcaaagtcaccgcctgaggccaagtccccagagaaggaggaagcaaaatctccagctgaggtcaagtcccccgagaaggccaagtccccagcaaaggaagaggcaaagtcaccggctgaggccaagtctccagagaaggccaagtccccagtgaaggaagaagcaaagtcaccggctgaggccaagtccccagtgaaggaagaagcaaaatctccagctgaggtcaagtccccggaaaaggccaagtctccaacgaaggaggaagcaaagtcccctgagaaggccaagtccccagagaaggaagaggccaagtcccctgagaaggccaagtccccagtgaaggcagaagcaaagtcccctgagaaggccaagtccccagtgaaggcagaagcaaagtcccctgagaaggccaagtccccagtgaaggaagaagcaaagtcccctgagaaggccaagtccccagtgaaggaagaagcaaagtcccctgagaaggccaagtccccagtgaaggaagaagcaaagacccccgagaaggccaagtccccagtgaaggaagaagccaagtccccagagaaggccaagtccccagagaaggccaagactcttgatgtgaagtctccagaagccaagactccagcgaaggaggaagcaaggtcccctgcagacaaattccctgaaaaggccaaaagccctgtcaaggaggaggtcaagtccccagagaaggcgaaatctcccctgaaggaggatgccaaggcccctgagaaggagatcccaaaaaaggaagaggtgaagtccccagtgaaggaggaggagaagccccaggaggtgaaagtcaaagagcccccaaagaaggcagaggaagagaaagcccctgccacaccaaaaacagaggagaagaaggacagcaagaaagaggaggcacccaagaaggaggctccaaagcccaaggtggaggagaagaaggaacctgctgtcgaaaagcccaaagaatccaaagttgaagccaagaaggaagaggctgaagataagaaaaaagtccccaccccagagaaggaggctcctgccaaggtggaggtgaaggaagacgctaaacccaaagaaaagacagaggtagccaagaaggaaccagatgatgccaaggccaaggaacccagcaaaccagcagagaagaaggaggcagcaccggagaaaaaagacaccaaggaggagaaggccaagaagcctgaggagaaacccaagacagaggccaaagccaaggaagatgacaagaccctctcaaaagagcctagcaagcctaaggcagaaaaggctgaaaaatcctccagcacagaccaaaaagacagcaagcctccagagaaggccacagaagacaaggccgccaaggggaagtaaggcagggagaaaggaacatccggaacagccaaagaaactcagaagagtcccggagctcaaggatcagagtaacacaattttcactttttctgtctttatgtaagaagaaactgcttagatgacggggcctccttcttcaaacaggaatttctgttagcaatatgttagcaagagagggcactcccaggcccctgcccccaggccctccccaggcgatggacaattatgatagcttatgtagctgaatgtgatacatgccgaatgccacacgtaaacacttgactataaaaactgcccccctcctttccaaataagtgcatttattgcctctatgtgcaactgacagatgaccgcaataatgaatgagcagttagaaatacattatgcttgagatgtcttaacctattcccaaatgccttctgttttccaaaggagtggtcaagcccttgcccagagctctctattctggaagagcggtccaggtggggccggggactggccactgaattatgccagggcgcactttccactggagttcactttcaattgcttctgtgcaataaaaccaagtgcttataaaatgaaaaaaaaaaaaaaaa

SEQ ID NO: 316 - protein, 1020 aa, Homo sapiens
MMSFGGADALLGAPFAPLHGGGSLHYALARKGGAGGTRSAAGSSSGFHSWTRTSVSSVSASPSRFRGAGAASSTDSLDTLSNGPEGCMVAVATSRSEKEQLQALNDRFAGYIDKVRQLEAHNRSLEGEAAALRQQQAGRSAMGELYEREVREMRGAVLRLGAARGQLRLEQEHLLEDIAHVRQRLDDEARQREEAEAAARALARFAQEAEAARVDLQKKAQALQEECGYLRRHHQEEVGELLGQIQGSGAAQAQMQAETRDALKCDVTSALREIRAQLEGHAVQSTLQSEEWFRVRLDRLSEAAKVNTDAMRSAQEEITEYRRQLQARTTELEALKSTKDSLERQRSELEDRHQADIASYQEAIQQLDAELRNTKWEMAAQLREYQDLLNVKMALDIEIAAYRKLLEGEECRIGFGPIPFSLPEGLPKIPSVSTHIKVKSEEKIKVVEKSEKETVIVEEQTEETQVTEEVTEEEEKEAKEEEGKEEEGGEEEEAEGGEEETKSPPAEEAASPEKEAKSPVKEEAKSPAEAKSPEKEEAKSPAEVKSPEKAKSPAKEEAKSPPEAKSPEKEEAKSPAEVKSPEKAKSPAKEEAKSPAEAKSPEKAKSPVKEEAKSPAEAKSPVKEEAKSPAEVKSPEKAKSPTKEEAKSPEKAKSPEKEEAKSPEKAKSPVKAEAKSPEKAKSPVKAEAKSPEKAKSPVKEEAKSPEKAKSPVKEEAKSPEKAKSPVKEEAKTPEKAKSPVKEEAKSPEKAKSPEKAKTLDVKSPEAKTPAKEEARSPADKFPEKAKSPVKEEVKSPEKAKSPLKEDAKAPEKEIPKKEEVKSPVKEEEKPQEVKVKEPPKKAEEEKAPATPKTEEKKDSKKEEAPKKEAPKPKVEEKKEPAVEKPKESKVEAKKEEAEDKKKVPTPEKEAPAKVEVKEDAKPKEKTEVAKKEPDDAKAKEPSKPAEKKEAAPEKKDTKEEKAKKPEEKPKTEAKAKEDDKTLSKEPSKPKAEKAEKSSSTDQKDSKPPEKATEDKAAKGK

SEQ ID NO: 317 - DNA, 6021 bp, Homo sapiens
tattttggcagccttatccaagtctggtacaacatagcaaagagaacaggctatgaaataagatggcaagaaagaaatttagtggattggaaatctctctgattgtcctttttgtcatagttactataatagctattgccttaattgttgttttagcaactaagacacctgctgttgatgaaattagtgattctacttcaactccagctactactcgtgtgactacaaatccttctgattcaggaaaatgtccaaatgtgttaaatgatcctgtcaatgtgagaataaactgcattccagaacaattcccaacagagggaatttgtgcacagagaggctgctgctggaggccgtggaatgactctcttattccttggtgcttcttcgttgataatcatggttataacgttcaagacatgacaacaacaagtattggagttgaagccaaattaaacaggataccttcacctacactatttggaaatgacatcaacagtgttctcttcacaactcaaaatcagacacccaatcgtttccggttcaagattactgatccaaataatagaagatatgaagttcctcatcagtatgtaaaagagtttactggacccacagtttctgatacgttgtatgatgtgaaggttgcccaaaacccatttagcatccaagttattaggaaaagcaacggtaaaactttgtttgacaccagcattggtcccttagtgtactctgaccagtacttacagatctcagcccgtcttccaagtgattatatttatggtattggagaacaagttcataagagatttcgtcatgatttatcctggaaaacatggccaatttttactcgagaccaacttcctggtgataataataataatttatacggccatcaaacattctttatgtgtattgaagatacatctggaaagtcattcggtgtttttttaatgaatagcaatgcaatggagatttttatccagcctactccaatagtaacatatagagttaccggtggcattctggatttttacatccttctaggagatacaccagaacaagtagttcaacagtatcaacagcttgttggactaccagcaatgccagcatattggaatcttggattccaactaagtcgctggaattataagtcactagatgtagtgaaagaagtggtaaggagaaaccgggaagctggcataccatttgatacacaggtcactgatattgactacatggaagacaagaaagactttacttatgatcaagttgcgtttaacggactccctcaatttgtgcaagatttgcatgaccatggacagaaatatgtcatcatcttggaccctgcaatttccataggtcgacgtgccaatggaacaacatatgcaacctatgagaggggaaacacacaacatgtgtggataaatgagtcagatggaagtacaccaattattggagaggtatggccaggattaacagtataccctgatttcactaatccaaactgcattgattggtgggcaaatgaatgcagtattttccatcaagaagtgcaatatgatggactttggattgacatgaatgaagtttccagctttattcaaggttcaacaaaaggatgtaatgtaaacaaattgaattatccaccgtttactcctgatattcttgacaaactcatgtattccaaaacaatttgcatggatgctgtgcagaactggggtaaacagtatgatgttcatagcctctatggatacagcatggctatagccacagagcaagctgtacaaaaagtttttcctaataagagaagcttcattcttacccgctcaacatttgctggatctggaagacatgctgctcattggttaggagacaatactgcttcatgggaacaaatggaatggtctataactggaatgctggagttcagtttgtttggaatacctttggttggagcagacatctgtggatttgtggctgaaaccacagaagaactttgcagaagatggatgcaacttggggcattttatccattttccagaaaccataattctgacggatatgaacatcaggatcctgcattttttgggcagaattcacttttggttaaatcatcaaggcagtatttaactattcgctacaccttattacccttcctctacactctgttttataaagcccatgtgtttggagaaacagtagcaagaccagttcttcatgagttttatgaggatacgaacagctggattgaggacactgagtttttgtggggccctgcattacttattactcctgttctaaaacagggagcagatactgtgagtgcctacatccctgatgctatttggtatgattatgaatctggtgcaaaaaggccatggaggaaacaacgggttgatatgtatcttccagcagacaaaataggattacatcttagaggaggttatatcatccccattcaagaaccagatgtaacaacaacagcaagccgtaagaatcctctaggacttatagtcgcattaggtgaaaacaacacagccaaaggagactttttctgggatgatggagaaactaaagatacaatacaaaatggcaactacatattatatacattttcagtttctaataacacattagatattgtgtgcacacattcatcatatcaggaaggaactaccttagcatttcagactgtaaaaatccttgggttgacagacagtgttacagaagttagagtggcggaaaataatcaaccaatgaacgctcattccaatttcacttatgatgcttctaaccaggttctcctaattgcagatctcaaacttaatcttggaagaaactttagtgttcaatggaatcaaattttctcagaaaatgaaagatttaattgttatccagatgcagatttggcaactgaacaaaagtgcacacaacgtggctgtgtatggagaacgggttcttctctatccaaagcacctgagtgttactttcccagacaagataactcttattcagtcaactcagctcgctattcatccatgggtataacagctgacctccaactaaatactgcaaatgccagaataaagttaccttctgaccccatctcaactcttcgtgtggaggtgaaatatcacaaaaatgatatgttgcagtttaagatttatgatccccaaaagaagagatatgaagtaccagtaccgttaaacattccaaccaccccaataagtacttatgaagacagactttatgatgtggaaatcaaggaaaatccttttggcatccagattcgacggagaagcagtggaagagtcatttgggattcttggctgcctggatttgcttttaatgaccagttcattcaaatatcgactcgcctgccatcagaatatatatatggttttggggaagtggaacatacagcatttaagcgagatctgaactggaatacttggggaatgttcacaagagaccaaccccctggttacaaacttaattcctatggatttcatccctattacatggctctggaagaggagggcaatgctcatggtgttttcttactcaacagcaatgcaatggatgttacattccagccaactcctgctctaacttaccgtacagttggagggatcttggatttttatatgtttttgggcccaactccacaagttgcaacaaagcaataccatgaagtaattggccatccagtcatgccagcttattgggctttgggattccaattatgtcgttatggatatgcaaatacttcagaggttcgggaattatatgacgctatggtggctgctaacatcccctatgatgttcagtacacagacattgactacatggaaaggcagctagactttacaattggtgaagcattccaggaccttcctcagtttgttgacaaaataagaggagaaggaatgagatacattattatcctggatccagcaatttcaggaaatgaaacaaagacttaccctgcatttgaaagaggacagcagaatgatgtctttgtcaaatggccaaacaccaatgacatttgttgggcaaaggtttggccagatttgcccaacataacaatagataaaactctaacggaagatgaagctgttaatgcttccagagctcatgtagctttcccagatttcttcaggacttccacagcagagtggtgggccagagaaattgtggacttttacaatgaaaagatgaagtttgatggtttgtggattgatatgaatgagccatcaagttttgtaaatggaacaactactaatcaatgcagaaatgacgaactaaattatccaccttatttcccagaactcacaaaaagaactgatggattacatttcagaacaatttgcatggaagctgagcagattcttagtgatggaacatcagttttgcattacgatgttcacaatctctatggatggtcacagatgaaacctactcatgatgcattgcaaaagacaactggaaaaagagggattgtaatttctcgttccacgtatcctactagtggacgatggggaggacactggcttggagacaactatgcacgatgggacaacatggacaaatcaatcattggtatgatggaatttagtctgtttggaatatcatatactggagcagacatctgtggttttttcaacaactcagaatatcatctctgtacccgctggatgcaacttggagcattttatccatactcaaggaatcacaacattgcaaatactagaagacaagatcccgcttcctggaatgaaacttttgctgaaatgtcaaggaatattctaaatattagatacaccttattgccctatttttacacacaaatgcatgaaattcatgctaatggtggcactgttatccgaccccttttgcatgagttctttgatgaaaaaccaacctgggatatattcaagcagttcttatggggtccagcatttatggttaccccagtactggaaccttatgttcaaactgtaaatgcctacgtccccaatgctcggtggtttgactaccatacaggcaaagatattggcgtcagaggacaatttcaaacatttaatgcttcttatgacacaataaacctacatgtccgtggtggtcacatcctaccatgtcaagagccagctcaaaacacattttacagtcgacaaaaacacatgaagctcattgttgctgcagatgataatcagatggcacagggttctctgttttgggatgatggagagagtatagacacctatgaaagagacctatatttatctgtacaatttaatttaaaccagaccaccttaacaagcactatattgaagagaggttacataaataaaagtgaaacgaggcttggatcccttcatgtatgggggaaaggaactactcctgtcaatgcagttactctaacgtataacggaaataaaaattcgcttccttttaatgaagacactaccaacatgatattacgtattgatctgaccacacacaatgttactctagaagaaccaatagaaatcaactggtcatgaagatcaccatcaattttagttgtcaatgggaaaaaacaccaggatttaagtttcacagcacttacaattttccctcttcacttggttcttgtactctacaaaatatagctttcataacatcgaaaagttattttgtagcgtacatcaatgataatgctaattttattatagtaatgtgacttggattcaattttaaggcatatttaacaaaatttgaatagccctatttatccttgttaagtatcagctacaattgtaaactagttactaaacatgtatgtaaatagctaagatataatttaaacgtgatttttaaattaaataaaatttttatgtaattatatatactatatttttctcaatgtttagcagatttaagatatgtaacaacaattatttgaagatttaattacttcttagtatgtgcatttaattagaaaaagagaataaaaaatgtaagtgtaaaaaaaaaaaa

SEQ ID NO: 318 - protein, 1827 aa, Homo sapiens
MARKKFSGLEISLIVLFVIVTIIAIALIVVLATKTPAVDEISDSTSTPATTRVTTNPSDSGKCPNVLNDPVNVRINCIPEQFPTEGICAQRGCCWRPWNDSLIPWCFFVDNHGYNVQDMTTTSIGVEAKLNRIPSPTLFGNDINSVLFTTQNQTPNRFRFKITDPNNRRYEVPHQYVKEFTGPTVSDTLYDVKVAQNPFSIQVIRKSNGKTLFDTSIGPLVYSDQYLQISARLPSDYIYGIGEQVHKRFRHDLSWKTWPIFTRDQLPGDNNNNLYGHQTFFMCIEDTSGKSFGVFLMNSNAMEIFIQPTPIVTYRVTGGILDFYILLGDTPEQVVQQYQQLVGLPAMPAYWNLGFQLSRWNYKSLDVVKEVVRRNREAGIPFDTQVTDIDYMEDKKDFTYDQVAFNGLPQFVQDLHDHGQKYVIILDPAISIGRRANGTTYATYERGNTQHVWINESDGSTPIIGEVWPGLTVYPDFTNPNCIDWWANECSIFHQEVQYDGLWIDMNEVSSFIQGSTKGCNVNKLNYPPFTPDILDKLMYSKTICMDAVQNWGKQYDVHSLYGYSMAIATEQAVQKVFPNKRSFILTRSTFAGSGRHAAHWLGDNTASWEQMEWSITGMLEFSLFGIPLVGADICGFVAETTEELCRRWMQLGAFYPFSRNHNSDGYEHQDPAFFGQNSLLVKSSRQYLTIRYTLLPFLYTLFYKAHVFGETVARPVLHEFYEDTNSWIEDTEFLWGPALLITPVLKQGADTVSAYIPDAIWYDYESGAKRPWRKQRVDMYLPADKIGLHLRGGYIIPIQEPDVTTTASRKNPLGLIVALGENNTAKGDFFWDDGETKDTIQNGNYILYTFSVSNNTLDIVCTHSSYQEGTTLAFQTVKILGLTDSVTEVRVAENNQPMNAHSNFTYDASNQVLLIADLKLNLGRNFSVQWNQIFSENERFNCYPDADLATEQKCTQRGCVWRTGSSLSKAPECYFPRQDNSYSVNSARYSSMGITADLQLNTANARIKLPSDPISTLRVEVKYHKNDMLQFKIYDPQKKRYEVPVPLNIPTTPISTYEDRLYDVEIKENPFGIQIRRRSSGRVIWDSWLPGFAFNDQFIQISTRLPSEYIYGFGEVEHTAFKRDLNWNTWGMFTRDQPPGYKLNSYGFHPYYMALEEEGNAHGVFLLNSNAMDVTFQPTPALTYRTVGGILDFYMFLGPTPQVATKQYHEVIGHPVMPAYWALGFQLCRYGYANTSEVRELYDAMVAANIPYDVQYTDIDYMERQLDFTIGEAFQDLPQFVDKIRGEGMRYIIILDPAISGNETKTYPAFERGQQNDVFVKWPNTNDICWAKVWPDLPNITIDKTLTEDEAVNASRAHVAFPDFFRTSTAEWWAREIVDFYNEKMKFDGLWIDMNEPSSFVNGTTTNQCRNDELNYPPYFPELTKRTDGLHFRTICMEAEQILSDGTSVLHYDVHNLYGWSQMKPTHDALQKTTGKRGIVISRSTYPTSGRWGGHWLGDNYARWDNMDKSIIGMMEFSLFGISYTGADICGFFNNSEYHLCTRWMQLGAFYPYSRNHNIANTRRQDPASWNETFAEMSRNILNIRYTLLPYFYTQMHEIHANGGTVIRPLLHEFFDEKPTWDIFKQFLWGPAFMVTPVLEPYVQTVNAYVPNARWFDYHTGKDIGVRGQFQTFNASYDTINLHVRGGHILPCQEPAQNTFYSRQKHMKLIVAADDNQMAQGSLFWDDGESIDTYERDLYLSVQFNLNQTTLTSTILKRGYINKSETRLGSLHVWGKGTTPVNAVTLTYNGNKNSLPFNEDTTNMILRIDLTTHNVTLEEPIEINWS

SEQ ID NO: 319 - DNA, 2093 bp, Homo sapiens
agcagcaactggaaaacaagcattgcattgcatcaggatgtctatgaaatggacttcagctcttctgctgatacagctgagctgttactttagctctgggagttgtggaaaggtgctggtgtggcccacagaattcagccactggatgaatataaagacaatcctggatgaacttgtccagagaggtcatgaggtgactgtattggcatcttcagcttccatttctttcgatcccaacagcccatctactcttaaatttgaagtttatcctgtatctttaactaaaactgagtttgaggatattatcaagcagctggttaagagatgggcagaacttccaaaagacacattttggtcatatttttcacaagtacaagaaatcatgtggacatttaatgacatacttagaaagttctgtaaggatatagtttcaaataagaaacttatgaagaaactacaggagtcaagatttgatgttgttcttgcagatgctgttttcccctttggtgagctgctggccgagttacttaaaataccctttgtctacaggcctcgcttctctcctggctacgcaattgaaaagcatagtggaggacttctgttccctccttcctatgtgcctgttgttatgtcagaactaagtgaccaaatgactttcatagagagggtaaaaaatatgatctatgtgctttattttgaattttggttccaaatatttgacatgaagaagtgggatcagttctacagtgaagttctaggaagacccactacgttatctgagacaatggcaaaagctgacatatggcttattcgaaactactgggattttcaatttcctcacccactcttaccaaatgttgagttcgttggaggactccactgcaaacctgccaaacccctaccgaaggaaatggaagagtttgtccagagctctggagaaaatggtgttgtggtgttttctctggggtcgatggtcagtaacacgtcagaagaaagggccaatgtaattgcatcagcccttgccaagatcccacaaaaggttctgtggagatttgatgggaataaaccagatactttaggactcaatactcggctgtacaagtggataccccagaatgatcttcttggtcacccaaaaaccagagcttttataactcatggtggagccaatggcatctataaggcaatctctcctagaatccctatggtgggcgttccattgtttgcagatcaacctgataacattgcacacatgaaggccaagggagcagctgttagtttggacttccacacaatgtcgagtacagacttactcaatgcactgaagacagtaattaatgatcctttatataaagagaatgctatgaaattatcaagaattcatcatgatcaaccagtgaagccccttgatcgagcagtcttctggattgaatttgtcatgcgccataaaggagccaagcaccttcgggttgcagcccacgacctcacctggttccagtaccactctttggatgtgactgggttcctgctggcctgtgtggcaactgtgatattcatcatcacaaaatgtctgttttgtgtctggaagtttgttagaacaggaaagaaggggaaaagagattaattacgtctgaggctggaagctgggaaacccaataaatgaactcctttagtttattacaacaagaagacgttgtgatacaagagattcctttcttcttgtgacaaaacatctttcaaaacttaccttgtcaagtcaaaatttgttttagtacctgtttaaccattagaaatatttcatgtcaaggaggaaaacattagggaaaacaaaaatgatataaagccatatgaggttatattgaaatgtattgagcttatattgaaatttattgttccaattcacaggttacatgaaaaaaaatttactaagcttaactacatgtcacacattgtacatggaaacaagaacattaagaagtccgactgacagtatcagtactgttttgcaaatactcagcatactttggatccatttcatgcaggattgtgttgttttaactgttgttgaggaagctaataaataattaaattgt

SEQ ID NO: 320 - protein, 528 aa, Homo sapiens
MSMKWTSALLLIQLSCYFSSGSCGKVLVWPTEFSHWMNIKTILDELVQRGHEVTVLASSASISFDPNSPSTLKFEVYPVSLTKTEFEDIIKQLVKRWAELPKDTFWSYFSQVQEIMWTFNDILRKFCKDIVSNKKLMKKLQESRFDVVLADAVFPFGELLAELLKIPFVYRPRFSPGYAIEKHSGGLLFPPSYVPVVMSELSDQMTFIERVKNMIYVLYFEFWFQIFDMKKWDQFYSEVLGRPTTLSETMAKADIWLIRNYWDFQFPHPLLPNVEFVGGLHCKPAKPLPKEMEEFVQSSGENGVVVFSLGSMVSNTSEERANVIASALAKIPQKVLWRFDGNKPDTLGLNTRLYKWIPQNDLLGHPKTRAFITHGGANGIYKAISPRIPMVGVPLFADQPDNIAHMKAKGAAVSLDFHTMSSTDLLNALKTVINDPLYKENAMKLSRIHHDQPVKPLDRAVFWIEFVMRHKGAKHLRVAAHDLTWFQYHSLDVTGFLLACVATVIFIITKCLFCVWKFVRTGKKGKRD

SEQ ID NO: 321 - DNA, 4884 bp, Homo sapiens
cggcgcgttgcggcaggtgccctgggcgtactgaggcgcggtggcctgagcccggccgccatcgatgaccccggtcgcggacttgcttcaggctggccaccccccgtcttgtttcatcatctgtgttgagtaaccatggggaggaagctggacctgtctggtttgactgatgatgaaacagagcatgttcttcaggtggttcaaagagacttcaatcttcgcaaaaaagaagaagaacgactaagtgagctgaagcagaagctggatgaggaaggcagcaagtgcagcatcctctcgaagcaccagcagtttgtggagcactgctgcatgcgctgctgctcgcccttcaccttcctcgtcaacaccaagcgccagtgtggagattgcaaattcaatgtctgcaagagctgctgctcctaccagaagcacgaaaaggcctgggtctgctgcgtctgccagcaagcgaggcttctgagggcccaatctctggaatggttctacaataatgtgaagagccgcttcaagcgctttggcagtgccaaggttctgaagaacctgtacaggaagcaccggctggagagtggcgcgtgcttcgacattctaggaggaagcctttttgagtcaaacctggagaatgaaggaagcatttctggcagtgattcaacattttataggcagtcagaaggacatagtgtgatggacaccttggctgtggccctacgggtggctgaagaggccattgaggaagcaatttccaaagcagaggcatatggggacagcctggacaagcaaaatgaggccagttacctgcgggaccacaaggaggagctaactgaggaactggccacgacaatcctgcagaagattatacgaaaacagaagagcaaaagtgagcagcaagtggaagaagagccaggatggccacatccccagagttgcagcacaaaggtggcagatgaggggacctcagcatcccctggaggctaccgtgctcccgctgccctctggaggtcccagtctgccttctcaatcactggagaagaagccctgaagacccctccagtggaggctccatcgaggcagccaagggaccaaggccaacacccgagagcagagtctgctctgcccagctggaagagtgtggacaggctggatgaaacaaacctggccccagttttgcagagccccgacgggaactgggtggccctgaaggatggcgctccaccccccacccgactactggccaaacctaagagcgggacgtttcaggccctggaggtggcctccagtgtggcatctgcctacgatgagatgggctccgatagcgaggaagactttgactggagtgaggccttgagcaagctgtgtcccaggtcccgggccctgcccaggaacccccagcctcagcccacacaggcccagagctctgaccaaggccccatagctgcctccccatcctctgcactctcccccaaccctgaggccatgtgctctgactcggagacctcctccgcaggctcttcccgagaagttgggcaccaggccagactgtcctggttgcagaggaaggcccccaggaaccctgcagctgagaagatgcgcttgcatggagagctggacgtgaacttcaacccccagttggccagcagggagacctcggacagcagcgagccggaggaggccccccacaccacagaccggcgggccaggaggtggagaagagcccgactgggctcagaagagccaagcaaagaaccatcttcccccagcgcccagctccgggatctagacacacatcaggtgtcggatgatttatcagagacagacatcagcaatgaggctcgggatccccagactctcacagacaccacagaggagaaacggagaaacaggctgtacgagttagcaatgaaaatgagtgaaaaggagacttcttcaggggaggatcaggagtctgagcccaagacagaatctgagaaccagaaggaaagtctgtcctctgaagacaacagccagagtgtccaggaagagctgaagaagaagttttctgctgtttctctctgcaacatctccacagaagtcctgaaagtcatcaatgccacagaggagttgatagcaggatctacagggccctgggagtccccacaagtccctcctgacagacagaaggggatgtttcctcgtgggacagaccaagtgagactggatgagcagctgacttccctggaagaaaatgtatacctggcagcaggcactgtgtatggactggagacccagctgactgagctagaagatgccgcccgctgcatccacagtggcactgatgagacccatctggcggatctggaggaccaggtggccacggctgcagcccaagtccaccatgctgaactccagatttcagatattgagagccggatttcagccctgaccattgcaggattaaacatagcaccatgtgtgcgcttcacaagaagacgggatcagaagcaaaggacccaggtacaaaccatagatacatcaaggcagcaaaggaggaaactgcctgctccaccggtgaaagctgaaaaaattgagacatcttcagtgactaccattaaaacatttaaccacaacttcattctccaaggctcctcaacaaacaggactaaggaaaggaaaggcaccaccaaggatttgatggagcctgctctggagtcagctgtgatgtactgacaccatggaattccactgccagtgacccactgcctccggccgtacacgacagtgccttgacccaacagccatcgagtactgtatgtatttccacctgaggagaaggcctggggaggccacagtgcaccattgcacagggctgtcctgatacctcatccagaaagccgtctcagacttcagcactgcggtcttgcccactctctgccttaggctcccaggggaatccaagacagaaaatgaagacactggcttccaacagcagcgctccatgtttaagatacatattttccctgtttgctttgctactgtatgttgactttaagatctttttttaaatacatttgattcagctagtattccatgtcaacaatttgtccaaaggaaaactgctggagggaggtggagggaggaaggtgggaattattatttaatacatcattaatgcttattaatctctcacaagcatctttgtcttgcaaatcctaagggaaaagcaagtccctgcagtgagcactagggacagtctaatttggggattgctcaaccatcaagactgcaggtctcccttcagccacctccttcctgctaaaagcttagcctaccacactaccagtcattcccatcgctttgcaatcacaagccacaggatgagaagttctgactcactcatgccatgcccagggctatctgaaacaatgtctcattaagaatttagggttcttccatgggcttactgacagttgcccagatctgaaggggaaagggtcttgagaaagaccatcactggctcaactttagggcactgtccagagtcaacatgatgtggtttagcagtgatcacatctaaacaaagtttaggtaaatgaattatcgcagagaaaaaccacatgagaaaatttttgtactccaaatttacttcccaataaatattcagcaaagtagtaaaatgaccttaaagataaaaatgattagggaatagccttagaaaatttataggtataaaaaattcaaggacaaactgtgcatttaatggacacaagaattgactctaactccatgtctgtggtttctttgaacccatatcaaatgtatgactatttagagtgtttataagagataatggaactgaactttcactcaattaattgggcattaacaaccttcttttatgtttgttcctgatatagtctgaatcttaggaagaaggtaaaagaaaggaggcaagagaatagttatgatgaatatgtgttaagtgcctgctctgaaggaggcaatgttcttctcatttgaatccttatggcaaccttattcaataggttttcccatatttcagatttaataactgaaggccagagagattaatttgccaaagccacacctttatgctaattatgattggaatgcatcacaaaagcctaactctgttgttttcaacctctacgttattttgctgctatgtgcatttccagatctgattttctgctaacttgtgtgctatgatccactcctgatgggggtctacattaatcttccagtactccttgctgatgctgtgttatgtgtcatctaacagaaatgactcctttgaaataagtaaatctttggctttttgttctgttggtgtgattcaaagcaaaacaaacaaacaaaaacaaattttaagaacacaacaaaaaagatttgacttccgaatagaatgttttctttaagaggcatgaaaagcaactattgttgtgttacagtgttaaaaatattcagttttctttgacaaaaatgtgtactgtgtaagccttgcaaacaaaaaacaacaaaaaagaagcagcagcagcagcctgctgtgtggcatctgaacttttataaaggtttccttgtgccaaataagtgcaaagatttaatttactattaaaaaccataagcatatgttatagttccagaagaattattttgtcatcaagtgattttgatctttagtgtcaatatttatatttagattaatttttataaatgaaaatattttaatggtttaagaaaatgaggacaacaggataatatctttgatgacttctgaaagttatgcttcccttcatgttatatgcacattgccaagaattactgtcaagagaaatgataagtaaaagtcatttatgaaaataaaaaaaaaaaaaaaaa

SEQ ID NO: 322 - protein, 859 aa, Homo sapiens
MGRKLDLSGLTDDETEHVLQVVQRDFNLRKKEEERLSELKQKLDEEGSKCSILSKHQQFVEHCCMRCCSPFTFLVNTKRQCGDCKFNVCKSCCSYQKHEKAWVCCVCQQARLLRAQSLEWFYNNVKSRFKRFGSAKVLKNLYRKHRLESGACFDILGGSLFESNLENEGSISGSDSTFYRQSEGHSVMDTLAVALRVAEEAIEEAISKAEAYGDSLDKQNEASYLRDHKEELTEELATTILQKIIRKQKSKSEQQVEEEPGWPHPQSCSTKVADEGTSASPGGYRAPAALWRSQSAFSITGEEALKTPPVEAPSRQPRDQGQHPRAESALPSWKSVDRLDETNLAPVLQSPDGNWVALKDGAPPPTRLLAKPKSGTFQALEVASSVASAYDEMGSDSEEDFDWSEALSKLCPRSRALPRNPQPQPTQAQSSDQGPIAASPSSALSPNPEAMCSDSETSSAGSSREVGHQARLSWLQRKAPRNPAAEKMRLHGELDVNFNPQLASRETSDSSEPEEAPHTTDRRARRWRRARLGSEEPSKEPSSPSAQLRDLDTHQVSDDLSETDISNEARDPQTLTDTTEEKRRNRLYELAMKMSEKETSSGEDQESEPKTESENQKESLSSEDNSQSVQEELKKKFSAVSLCNISTEVLKVINATEELIAGSTGPWESPQVPPDRQKGMFPRGTDQVRLDEQLTSLEENVYLAAGTVYGLETQLTELEDAARCIHSGTDETHLADLEDQVATAAAQVHHAELQISDIESRISALTIAGLNIAPCVRFTRRRDQKQRTQVQTIDTSRQQRRKLPAPPVKAEKIETSSVTTIKTFNHNFILQGSSTNRTKERKGTTKDLMEPALESAVMY

SEQ ID NO: 323 - DNA, 2254 bp, Homo sapiens
gatccctcccatctcacagtacctcacaggtctcttcccccgagcagtgcattgctggagcgaggagaagctcacgaatcagctgcaggtctctgttttgaaaaagcagagatacagaggcagaggaaaggggtggactcctatgtgacctgttcttagagcaagacaatcaccatctgaattccagaagccctgttcatggttggggatattttctcgactgcatggaatcagaaagaagcaaaaggatgggaaatgcctgcattcccctgaaaagaattgcttatttcctatgtctcttatctgcgcttttgctgactgaggggaagaaaccagcgaagccaaaatgccctgccgtgtgtacttgtaccaaagataatgctttatgtgagaatgccagatccattccacgcaccgttcctcctgatgttatctcattatcctttgtgagatctggttttactgaaatctcagaagggagttttttattcacgccatcgctgcagctcttgttattcacatcgaactcctttgatgtgatcagtgatgatgcttttattggtcttccacatctagagtatttattcatagaaaacaacaacatcaagtcaatttcaagacatactttccggggactaaagtcattaattcacttgagccttgcaaacaacaatctccagacactcccaaaagatattttcaaaggcctggattctttaacaaatgtggacctgaggggtaattcatttaattgtgactgtaaactgaaatggctagtggaatggcttggccacaccaatgcaactgttgaagacatctactgcgaaggccccccagaatacaagaagcgcaaaatcaatagtctctcctcgaaggatttcgattgcatcattacagaatttgcaaagtctcaagacctgccttatcaatcattgtccatagacactttttcttatttgaatgatgagtatgtagtcatcgctcagccttttactggaaaatgcattttccttgaatgggaccatgtggaaaagaccttccggaattatgacaacattacaggcacatccactgtagtatgcaagcctatagtcattgaaactcagctctatgttattgtggcccagctgtttggtggctctcacatctataagcgagacagttttgcaaataaattcataaaaatccaggatattgaaattctcaaaatccgaaaacccaatgacattgaaacattcaagattgaaaacaactggtactttgttgttgctgacagttcaaaagctggttttactaccatttacaaatggaacggaaacggattctactcccatcaatccttacacgcgtggtacagggacactgatgtggaatatctagaaatagtcagaacacctcagacactcagaacgcctcatttaattctgtctagtagttcccagcgtcctgtaatttatcagtggaacaaagcaacacaattattcactaaccaaactgacattcctaacatggaggatgtgtacgcagtgaagcacttctcagtgaaaggggacgtgtacatttgcttgacaagattcattggtgattccaaagtcatgaaatggggaggctcctcgttccaggatattcagaggatgccatcgcgaggatccatggtgttccagcctcttcaaataaataattaccaatatgcaattcttggaagtgattactcctttactcaagtgtataactgggatgcagagaaagccaaatttgtgaaatttcaggaattaaatgttcaggcaccaagatcattcacacatgtgtccattaataagcgtaattttctttttgcttccagttttaagggaaatacacagatttacaaacatgtcatagttgacttaagcgcatgagacaccaaattctgtggctgccatcagaaattttctacagtacatgacccggatgaactcaatgcatgatgactcttcttatcacacttgcaaatgaatgcctttcaaacattgagactgctagaaccaagcactaccagtatctccatccttaactgtccagtccagtgatgtgggaagttaccttttataagacaaaatttaattgtgtaactgttctttgcagtgaagatgtgtaaataagcgtttaatggtatctgttactccaaaaagaaatattaatatgtacttttccatttatttattcatgtgtacagaaacaactgccaaataaaatgtttacattttctttcata

SEQ ID NO: 324 - protein, 557 aa, Homo sapiens
MESERSKRMGNACIPLKRIAYFLCLLSALLLTEGKKPAKPKCPAVCTCTKDNALCENARSIPRTVPPDVISLSFVRSGFTEISEGSFLFTPSLQLLLFTSNSFDVISDDAFIGLPHLEYLFIENNNIKSISRHTFRGLKSLIHLSLANNNLQTLPKDIFKGLDSLTNVDLRGNSFNCDCKLKWLVEWLGHTNATVEDIYCEGPPEYKKRKINSLSSKDFDCIITEFAKSQDLPYQSLSIDTFSYLNDEYVVIAQPFTGKCIFLEWDHVEKTFRNYDNITGTSTVVCKPIVIETQLYVIVAQLFGGSHIYKRDSFANKFIKIQDIEILKIRKPNDIETFKIENNWYFVVADSSKAGFTTIYKWNGNGFYSHQSLHAWYRDTDVEYLEIVRTPQTLRTPHLILSSSSQRPVIYQWNKATQLFTNQTDIPNMEDVYAVKHFSVKGDVYICLTRFIGDSKVMKWGGSSFQDIQRMPSRGSMVFQPLQINNYQYAILGSDYSFTQVYNWDAEKAKFVKFQELNVQAPRSFTHVSINKRNFLFASSFKGNTQIYKHVIVDLSA

SEQ ID NO: 325 - DNA, 4784 bp, Homo sapiens
gaggcgacactgagtctccaagtccggagaggtgcccgagggaaaagaggcggcagctaaactggtcctggagagaagccccttccgcccctctcctcagccagcatgtcccggactccgccgctcctcagtccgcgcggtggggaccccgggccgtggcggccggcgcagccctgacgggttgcgaaccagggggcgccccgaacgcgggggttggggtctgggagcgcgagcggccgctacggtacgagcggggtgtgctgagtcccgtggccacccccggccccagccatgaggagggacgagcgagacgccaaagccatgcggtccctgcagccgccggatggggccggctcgccccccgagagtctgaggaacggctacgtgaagagctgcgtgagccccttgcggcaggaccctccgcgcggcttcttcttccacctctgccgcttctgcaacgtggagctgcggccgccgccggcctctccccagcagccgcggcgctgctcccccttctgccgggcgcgcctctcgctgggcgccctggctgcctttgtcctcgccctgctgctgggcgcggaacccgagagctgggctgccggggccgcctggctgcggacgctgctgagcgtgtgttcgcacagcttgagccccctcttcagcatcgcctgtgccttcttcttcctcacctgcttcctcacccggaccaagcggggacccggcccgggccggagctgcggctcctggtggctgctggcgctgcccgcctgctgttacctgggggacttcttggtgtggcagtggtggtcttggccttggggggatggcgacgcagggtccgcggccccgcacacgcccccggaggcggcagcgggcaggttgctgctggtgctgagctgcgtagggctgctgctgacgctcgcgcacccgctgcggctccggcactgcgttctggtgctgctcctggccagcttcgtctggtgggtctccttcaccagcctcgggtcgctgccctccgccctcaggccgctgctctccggcctggtggggggcgctggctgcctgctggccctggggttggatcacttctttcaaatcagggaagcgcctcttcatcctcgactgtccagtgccgccgaagaaaaagtgcctgtgatccgaccccggaggaggtccagctgcgtgtcgttaggagaaactgcagccagttactatggcagttgcaaaatattcaggagaccgtcgttgccttgtatttccagagaacagatgattctttgggattgggacttaaaacaatggtataagcctcattatcaaaattctggaggtggaaatggagttgatctttcagtgctaaatgaggctcgcaatatggtgtcagatcttctgactgatccaagccttccaccacaagtcatttcctctctacggagtattagtagcttaatgggtgctttctcaggttcctgtaggccaaagattaatcctctcacaccatttcctggattttacccctgttctgaaatagaggacccagctgagaaaggggatagaaaacttaacaagggactaaataggaatagtttgccaactccacagctgaggagaagctcaggaacttcaggattgctacctgttgaacagtcttcaaggtgggatcgtaataatggcaaaaggcctcaccaagaatttggcatttcaagtcaaggatgctatctaaatgggccttttaattcaaatctactgactatcccgaagcaaaggtcatcttctgtatcactgactcaccatgtaggtctcagaagagctggtgttttgtccagtctgagtcctgtgaattcttccaaccatggaccagtgtctactggctctctaactaatcgatcacccatagaatttcctgatactgctgattttcttaataagccaagcgttatcttgcagagatctctgggcaatgcacctaatactccagatttttatcagcaacttagaaattctgatagcaatctgtgtaacagctgtggacatcaaatgctgaaatatgtttcaacatctgaatcagatggtacagattgctgcagtggaaaatcaggtgaagaagaaaacattttctcgaaagaatcattcaaacttatggaaactcaacaagaagaggaaacagagaagaaagacagcagaaaattatttcaggaaggtgataagtggctaacagaagaggcacagagtgaacagcaaacaaatattgaacaggaagtatcactggacctgattttagtagaagagtatgactcattaatagaaaagatgagcaactggaattttccaatttttgaacttgtagaaaagatgggagagaaatcaggaaggattctcagtcaggttatgtataccttatttcaagacactggtttattggaaatatttaaaattcccactcaacaatttatgaactattttcgtgcattagaaaatggctatcgagacattccttatcacaatcgtatacatgccacagatgtgctacatgcagtttggtatctgacaacacggccagttcctggcttacagcagatccacaatggttgtggaacaggaaatgaaacagattctgatggtagaattaaccatgggcgaattgcttatatttcttcgaagagctgctctaatcctgatgagagttatggctgcctgtcttcaaacattcctgcattagaattgatggctctatacgtggcagctgccatgcatgattatgatcacccagggaggacaaatgcatttctagtggctacaaatgcccctcaggcagttttatacaatgacagatctgttctggaaaatcatcatgctgcgtcagcttggaatctatatctttctcgcccagaatacaacttccttcttcatcttgatcatgtggaattcaagcgctttcgttttttagtcattgaagcaatccttgctacggatcttaaaaagcattttgattttctcgcagaattcaatgccaaggcaaatgatgtaaatagtaatggcatagaatggagtaatgaaaatgatcgcctcttggtatgccaggtgtgcatcaaactggcagatataaatggcccagcaaaagttcgagacttgcatttgaaatggacagaaggcattgtcaatgaattttatgagcagggagatgaagaagcaaatcttggtctgcccatcagtccattcatggatcgttcttctcctcaactagcaaaactccaagaatcttttatcacccacatagtgggtcccctgtgtaactcctatgatgctgctggtttgctaccaggtcagtggttagaagcagaagaggataatgatactgaaagtggtgatgatgaagacggtgaagaattagatacagaagatgaagaaatggaaaacaatctaaatccaaaaccaccaagaaggaaaagcagacggcgaatattttgtcagctaatgcaccacctcactgaaaaccacaagatatggaaggaaatcgtagaggaagaagaaaaatgtaaagctgatgggaataaactgcaggtggagaattcctccttacctcaagcagatgagattcaggtaattgaagaggcagatgaagaggaatagcgacagtttgagtaaaagaaaagtcatattgaagaagcccagagggttgtgcccaggggcagaaatcattgcctagtgttcaccggctgactctcaactgaccattcccatgtggacaggccttaatactgtgagaggatccttgctctgctggcagtttcccactcctatgcactttcacaggaactagaaaactattcttaaaccaaaaataccatccgtgttgacccatgttgcagagcccttacttaaatccttcactggtgtatgaatactttgtcataatgctgctttgctgggtagtgagctcttatttttcactgggggtcagctataactaaaaactcaagtgacatatttcagttaccaaagtggccaggaactttttgcttttatgaaaatagattcatattgtatttcccagtgtgtcttttatgtctttgaatgttttggagaaaagtctatgcctgtctaaaaatgaatccagtgttgcctttctgagggatttctgctcaatgcaatacactgttcagtgctattctcccagctaggtttatccatgaaggactgagtgacctttgttgtatttaacaaaatccaggtgcatcaatttctgatgctttttactattgtgtattatctactatgtgtgttttatttctgctgagagtattcaggtttgccatggacatcagaagtttgaattccagtcttatcttatgttccatggctgaattttaaagctgtttaggtttaacaatgaagggatttattctttagtcaaaattgttgtttttactctagctcaggattcgtatttttaaagatttagttaatataaacacagcacagatttgtcagaagaaaaaaaatttgctgtaataccaaaactaacctcatcaaagatacagaaaaaaagaaatatagtgagccctaaaggacacatacattgaataaataattggaacatgtggttatctttagatccacatcttagctgtcatttgttcactctaaaactgatgttcatctttctgttaatttccctctgcctaaagagtacatgacagaaatgacctatcactacttattatttctgaagcctaactgcaagagtgatttcttgagaacaagtaaagaactggctcgtgccg

SEQ ID NO: 326 - protein, 1112 aa, Homo sapiens
MRRDERDAKAMRSLQPPDGAGSPPESLRNGYVKSCVSPLRQDPPRGFFFHLCRFCNVELRPPPASPQQPRRCSPFCRARLSLGALAAFVLALLLGAEPESWAAGAAWLRTLLSVCSHSLSPLFSIACAFFFLTCFLTRTKRGPGPGRSCGSWWLLALPACCYLGDFLVWQWWSWPWGDGDAGSAAPHTPPEAAAGRLLLVLSCVGLLLTLAHPLRLRHCVLVLLLASFVWWVSFTSLGSLPSALRPLLSGLVGGAGCLLALGLDHFFQIREAPLHPRLSSAAEEKVPVIRPRRRSSCVSLGETAASYYGSCKIFRRPSLPCISREQMILWDWDLKQWYKPHYQNSGGGNGVDLSVLNEARNMVSDLLTDPSLPPQVISSLRSISSLMGAFSGSCRPKINPLTPFPGFYPCSEIEDPAEKGDRKLNKGLNRNSLPTPQLRRSSGTSGLLPVEQSSRWDRNNGKRPHQEFGISSQGCYLNGPFNSNLLTIPKQRSSSVSLTHHVGLRRAGVLSSLSPVNSSNHGPVSTGSLTNRSPIEFPDTADFLNKPSVILQRSLGNAPNTPDFYQQLRNSDSNLCNSCGHQMLKYVSTSESDGTDCCSGKSGEEENIFSKESFKLMETQQEEETEKKDSRKLFQEGDKWLTEEAQSEQQTNIEQEVSLDLILVEEYDSLIEKMSNWNFPIFELVEKMGEKSGRILSQVMYTLFQDTGLLEIFKIPTQQFMNYFRALENGYRDIPYHNRIHATDVLHAVWYLTTRPVPGLQQIHNGCGTGNETDSDGRINHGRIAYISSKSCSNPDESYGCLSSNIPALELMALYVAAAMHDYDHPGRTNAFLVATNAPQAVLYNDRSVLENHHAASAWNLYLSRPEYNFLLHLDHVEFKRFRFLVIEAILATDLKKHFDFLAEFNAKANDVNSNGIEWSNENDRLLVCQVCIKLADINGPAKVRDLHLKWTEGIVNEFYEQGDEEANLGLPISPFMDRSSPQLAKLQESFITHIVGPLCNSYDAAGLLPGQWLEAEEDNDTESGDDEDGEELDTEDEEMENNLNPKPPRRKSRRRIFCQLMHHLTENHKIWKEIVEEEEKCKADGNKLQVENSSLPQADEIQVIEEADEEE

SEQ ID NO: 327 - DNA, 4038 bp, Homo sapiens
gtgcgtgggggtaaccggcgcgggcgccgagatagcgccgggcagagggacccggctaccctggacagcgcatcgccgcccgcccgggtccgcgccacagccgctgcggatcatggaacatctaaaggcctttgatgatgaaatcaatgcttttttggacaatatgtttggaccgcgagattctcgagtcagagggtggttcatgttggactcttaccttcctaccttttttcttactgtcatgtatctgctctcaatatggctgggtaacaagtatatgaagaacagacctgctctttctctcaggggtatcctcaccttgtataatcttggaatcacacttctatccgcgtacatgctggcagagctcattctctccacttgggaaggaggctacaacttacagtgtcaagatcttaccagcgcaggggaagctgacatccgggtagccaaggtgctttggtggtactatttctccaaatcagtagagttcctggacacaattttcttcgttttgcggaaaaaaacgagtcagattacttttcttcatgtatatcatcatgcttctatgtttaacatctggtggtgtgtcttgaactggataccttgtggacaaagtttctttggaccaacactgaacagttttatccacattcttatgtactcctactatggactttctgtgtttccatctatgcacaagtatctttggtggaagaaatatctcacacaggctcagctggtgcagttcgtgctcgccatcacgcacaccatgagcgccgtcgtgaaaccgtgtggcttccccttcggttgtctcatcttccagtcatcttatatgctaacgttagtcatcctcttcttaaatttttacgttcagacataccgaaaaaagccaatgaagaaagatatgcaagagccacctgcagggaaagaagtgaagaatggtttttccaaagcctacttcactgcagcaaatggagtgatgaacaagaaagcacaataaaaatgagtaacagaaaaagcacatatactagcctaacagattcgcttgttttaaagcaaagactgaattgaaggttacatgttttaggataaactaatttcttttgagttcataaatcatttgtacccagaatgtattaatatattgctattaggttaatctgttaactgaatgctttgatcagcattgaggtgatgctcacctccgaggacctcagaactggtgcagcttctctctccctccctcccacagactgaacctttcgccagaagctgtccttataacgccttatacgcatacacagccaggaaacgtggagcattgtttctcacagagagtctccaaataaaaagggttttgttcagattaaaatgtttacaacaaaatgttaattatattctaaatacagggtatgttctaatctatattaagcaataatgccggtgcataatcattccatttgttcctttagcaatcaaccccagaaaatattaaaatgggatcatacacagaagatagaaaaatctagcaaaacttctctttctgtaagccagagtcttgtctatcagattcccacaaccactcctgattctaaatttagtgatatggtaatgaaattggtatttattttaaatattagttattctaaggagaaaaaaatgcttctgcaagattttcataattcgggggctgtggataggattgttcctctgtttccctaatcattcatctgttcatgtctccctcttgtgccagtcagcctaggttatacagatgccatgctccacaccacgagcagtgtacaaatctggctgcccgtttactttctgagcaagcactggagtccactccgacctttttctttgaacatgcatgctgctggaatatgtataaatcagaactagcagaagtagcagagtgatgggagcaaaataggcactgaattcgtcaactcttttttgtgagcctacttgtgaatattacctcagatacctgttgtcactcttcacaggttatttaagtttttgaagctgggaggagaaagatggagtagcttggaaagattccagcactgagccgtgggccggtcatgagccacgataaaaaatgccagtttggcaaactcagcactcctgttccctgctcaggtatatgcgatctctactgagaagcaagcacaaaagtagacaaaagtattaatgagtatttcctttctccataagtgcaggactgttactcactactaaactctaccaagaatggaaacaaagaatattttctgaagatttttttgaagattaatttataccctataaaataaaacttgttagcttcgatgaagtcacttcatcttctctcctaccttatttttttaaataagtttttaggtcctgacactgacatcaaatacatgcacaccagaaaggcatttccaccaccgtccccactcattagcgtccagagtgcctttctctctcggctttttttcccccctgagctctagttttaaactttctcctgttaaaaaaattgtacttttatttcatgtaaactgcccctctgaggatttgggcatattttttggaaggtgcctaatgcttaggatagtctctagggtgatgcactgcacctgcttccttcccttcagtgcggccgacccatttctgttgaacagatgtctcctgtgtgatgcccctgactcttacatttatctttctaaatcattttctgaagctgacttgctctagggtgcttcatcaccacttccatcttgcatcaccttataactgttctgtcttgttctctcccagcaatttattttaaaacaagggctagcttcaagcatgactgttaatggctcctctgtgacaaaacacaagttggaccaaggagaaagccctttggagaaactggaccctagttcagtttagatctcaaatataggctgaaatctcttaccaaagtgcgttccagataaaaatgagacttagaagacagactggtctaatatgctcactggtcatcacattcagcttattcttacgtgccagtgaggccctaaggtctcagtgcatagcatacctgccactctggatgttttcctgggcttcatatctgtatggcaaggagggagctgtccttcagcagacaaagtcaagcagctttaagtacaaggcagcttgaaacctctctgatgaaagtgaaaaatgtgggtagcttatactttcaaactaatgccagtgactagagagaggtttcattcatgatgtgtatttccaatttggtcttcaattcaagagatgcttcataaaacacttatagccttaaaccattcaagggctaattaaaaaaatagttatgaaatcttagccacaaaaaataaatcaggtaaacattttaacctgtcgttaagtgttgtaacttcaaaaaaccaaaatgcttattttaatgtgatttttctaaaactattgaaaaattaatatttctataatctattaaaaaaaatggagaatgttttctctcaaatttcctctgacccatgggaatgaaaatacttaaatactgtaaagcatatctattaataattcccccaattttttaaactaacaaaatggaatgttaactgaatggaattaaacatagcaattgtcaagccatcaaaattatatatcgaaccacttaggcatgttacggggtaaagtcctcacccctgcatttgagaaatattttattatttttattttaaggcaaaacagtgtttactgtgatgggcagaacagccttttgtatctaggagtccatttgagttctttccaatatttccatatcgttcataaatgtgtctgggggcttccttgtttggaaaatatggatatcgctttgttttcctttgaaagtaattatatcttaagaacatagtatcatgaatggagtagacagggaggctgcagaagccatttttctttgtagataaaaagcattatctatgattgttgtataataaattgatttttacattaaaaaaaaaaaaaaaa

SEQ ID NO: 328 - protein, 296 aa, Homo sapiens
MEHLKAFDDEINAFLDNMFGPRDSRVRGWFMLDSYLPTFFLTVMYLLSIWLGNKYMKNRPALSLRGILTLYNLGITLLSAYMLAELILSTWEGGYNLQCQDLTSAGEADIRVAKVLWWYYFSKSVEFLDTIFFVLRKKTSQITFLHVYHHASMFNIWWCVLNWIPCGQSFFGPTLNSFIHILMYSYYGLSVFPSMHKYLWWKKYLTQAQLVQFVLAITHTMSAVVKPCGFPFGCLIFQSSYMLTLVILFLNFYVQTYRKKPMKKDMQEPPAGKEVKNGFSKAYFTAANGVMNKKAQ

SEQ ID NO: 329 - DNA, 5811 bp, Homo sapiens
ctcctcccctccccctccgccctcctccgctccgggccagcgcggcggcggcggcggcggcggcagcagcaggagcagccccggctgcgggtcgcgacggcggcggggcgccccctcccccgtgccggggcgcggcggagggatgtggggccttgcgggaggaaggcttttcggcatcttctcggccccggtgctggtggctgtggtgtgctgcgcccagagtgtgaacgatcccgggaacatgtcctttgtgaaggagacggtggacaagctgttgaaaggctacgacattcgcctaagacccgacttcgggggtcccccggtctgcgtggggatgaacatcgacatcgccagcatcgacatggtttccgaagtcaacatggattataccttaaccatgtattttcaacaatattggagagataaaaggctcgcctattctgggatccctctcaacctcacgcttgacaatcgagtggctgaccagctatgggtgcccgacacatatttcttaaatgacaaaaagtcatttgtgcatggagtgacagtgaaaaaccgcatgatccgtcttcaccctgatgggacagtgctgtatgggctcagaatcaccacgacagcagcatgcatgatggacctcaggagataccccctggacgagcagaactgcactctggaaattgaaagctatggctacaccacggatgacattgagttttactggcgaggcggggacaaggctgttaccggagtggaaaggattgagctcccgcagttctccatcgtggagcaccgtctggtctcgaggaatgttgtcttcgccacaggtgcctatcctcgactgtcactgagctttcggttgaagaggaacattggatacttcattcttcagacttatatgccctctatactgataacgattctgtcgtgggtgtccttctggatcaattatgatgcatctgctgctagagttgccctcgggatcacaactgtgctgacaatgacaaccatcaacacccaccttcgggagaccttgcccaaaatcccctatgtcaaagccattgacatgtaccttatgggctgcttcgtctttgtgttcctggcccttctggagtatgcctttgtcaactacattttctttggaagaggccctcaaaggcagaagaagcttgcagaaaagacagccaaggcaaagaatgaccgttcaaagagcgaaagcaaccgggtggatgctcatggaaatattctgttgacatcgctggaagttcacaatgaaatgaatgaggtctcaggcggcattggcgataccaggaattcagcaatatcctttgacaactcaggaatccagtacaggaaacagagcatgcctcgagaagggcatgggcgattcctgggggacagaagcctcccgcacaagaagacccatctacggaggaggtcttcacagctcaaaattaaaatacctgatctaaccgatgtgaatgccatagacagatggtccaggatcgtgtttccattcactttttctcttttcaacttagtttactggctgtactatgttaactgagtgactgtacttgatttttcaaagacttcatttaacactgagtgaaatattactctgcctgtcaagtttttatacctgtacacacacagacacacaagcagacacacacatatatacatacgcaattgtatatatatgtgaactttctcagcatatatataaaatacacgtgtatatgaggatgtatgtgtatatgtttatacacacaggagtcagtgcccatgtgtatggaagacaaatacacatacatatatacattttgcagctatggacaatttaccacaggatgcatattaaagaaagtcatagtttttttcttttttaattgaaagggacaagtatcatctaaatattatgccttgagaatgagggcgtgaaacacaatatcatccccaaatgtgtcttgtattatcataagttagatgttttagtttaaaaatcagaaagacattcttagttaatctttgaaaactcatacagtggtattgctagtttaaaatgagtcacttacttcatatcctctcgttcagtttagtaagcaaaggcttcttggcttctctggtgatggggtttgttttcatcgggcatacgttttctgcaatggtttagtggctggggtgagccactggcagtgtgcttacctgttgtctgaaacatagatagatcccacgttgatgtctgaacgaccgtcttttgaaaactcatcgggagtgaatggcatctcgttgtaagtactctaatatacagtgtgtagtttgtttctgttgttcacttggagtggatccagcttcactgtcatgtgcgaacacagtgacacgtttggccagtgacatttcaatcactgaaaatgtgctctacatctcgtatggatttctaggcctgatatccaacagaaagcatagacgtctcaggttattcgttactctaaggtaaaaccatctaggatgattttcccccttgcagttatgttatcattcttataacattgtatgttaatagaaaatatatttgcataatatgcatatatatgtatatttaccaagattttgtttcttacgcttgctatcatggcagcatgcgatgtcatattttcctttatgtgatgtaactactttctgttatctagaaattaagattgaagctaaaacacttctactgttcaatttcagaaactaagaatcatcctcatgcctttatttctgtatctgacatatttcataagcacatccaactactcctagactgactaggattctgcaggaacatgacccgtacacaccacgcgtcacccaacgacccatgaccgttctctgaggcaaaggagggcaacctgacagcaaacacagtcactgttggttccttctgatccacagcctcatcagtatttggactttttaaagctcgtagaaacaagacaaggtgcaccggtttcatagacgcaaccttaacttactatttagatgagatctttctaaagaaaaaaaaaagagatgatatattttttgtaaacaatatttctatcacaggcatccataaactgaaatgactacagttgtgcaaacaggtgtcacagtgaagttgagcatttggagaaaaaaataaaaagcaaaatttgcaggaagaactgctaaattaatactttatcccaaaatgccacgtatgcctcaccctctctgttctatccaaaaccaaggaccagagtgctccaatggtaggccccagttgtctcgatgtaggtagaggcaccaccctccccgaggatgcgtgtggtgtggactatccccatgagctgaccactacttgatttttctttggtggccgtaacaacctttaatttgtgggcatctgcaacagttcaaaacccaccatcagataaaacataatccacaaaatctcacgctagaggcaattacctacttttagacccttttccctctttcattcctatctttttcctcctaatcgctgctctctggttttattttcatctggagactagccagggatttctttggctttggcttttctctgaccattttttccatgggtaacaatgggggatcctaaaagttaaacagattgggaaaaaccttgttaagtggccttatcattattatcatgttaaagaaaaaaaatacatttgcaaagaccttatccctttcaatacttcaggtatctttttctgtatccagtaattaaaggtgtgaggtccacatgcagaagagggaccccaaaatgtaaatggatgtggacaaaaacagtcaatggtctatttaagtgtataatttatactattcagaactgtgacattaattctttctgggagaaaagtgatttaaaacttttttgatgcatagttgaggtacccaaatatcaaaggcagagaccccatggggctccaaagagctgcagtctccttcccaaggttttctggatataaatttgcatggtatagtcataatagcttttgagctttttatatgcatttggcaccaagactgggatccacaactttgtagacactgcgatgaagttaacatattagctatactataaatagtgtttgtaactacacacacacacacacacacacacacaaatacatacatatattctgtaaaaacaaaaaaaaactttttaagatccttgggtatgtgtttgctttactccatttcagaagaaaattacttttcttctaacaaaattattttatagcttctccatttttaaaacttgtgagagcattgagaagagaactctgactgtgttaacagaagagagttgaattggagtctctgttgtgttaaaatgacctctcgttactccacagtagttatttgagccagtgactgagtcgcgttgaggaattctgaacccggacctctgacgttgttgggaggtggctgttacccacacccagacctcttgagtaaggacagaaacgttatcattggggatataatgagatttctttcttaacaattgaaagtaataaagagttaattttctcagtagtcctgtctttccaaaatgcgccacaggggctcaagatctacagaagaatcttgttatgacagtttgttattacccatattcagatatccttgagataatggaagagccctgctacataactccctacagagaaagactgatagacttgagtagtccttaaaacaagtgttattcctgttcaccaaccccgggactgtggaggggtttcactgtctataccatgcgacatccatttcccctgaatctcaaacgaactagaaagtatgtcatgataatatttccattagatttggaagctacctgtacatctgcaatattgtgtttttaacgccagcacccagaactttgacatgttcagtcactccctgaaaggcacttctctcttgtccaaacacagcgttgacatttttactgaggagatcatctcaaaggtgatgccaaacgagtctggggctggttttaaggggacaggcacattgcagttgtaggtgttcattttcagcatctagtagataatccattggtgtttgtcccaccattggtgtattctaacaagaatgtgtccaactttgaatctcctggcttgaaagtataaaccatcacttaattcttattttaactctccacctgaaaaccagttcatatttctggccattttatgtaagcaaaactgaacaattggtgaaacattttgttactcttggaattgactctggctgtcagtgtgagccattagagtaacatcgaatcttggggcaaagaactgcccaggtgaattaaatttttccaggacactagctagtgtgccttggattgattacctcttctactgcattgaaaggcgccatgttttcctgaaatactaaattcccaacacctgggtaaacaatgaccttccagagagtggctcccgtatgcctctccctaggaccaaccccatgaacatgttttgtcacgtttgtctcatgtttctacttcacaagtcagtgagtgtgtttaaggtaagtacaggattattctagtaggaataggcgattgctgtcataatcaattctcatgttgatttcattttattgtaaagataaatttaaacccagttttgcttaagcacattgatgtaattttttggtattatttgacatgaaaaaacagcaaaattgagtgatagatacaatatgaaacttgttgatgaatgaattcaaatttattaaaaaaggagtaactgacctaaa

SEQ ID NO: 330 - protein, 473 aa, Homo sapiens [sequence omitted]

SEQ ID NO: 331 - DNA, 3653 bp, Homo sapiens
gcgctcggcgcccaccaggcggacgcccaggagaacccctgcctccgtcgcggctcctggagagctgatcgttcacctgccccggcccgcctgaggacgggggtgccttcatgcggcccccacactcctcaccccgccgccgccgccgtccccgagctccgcacagtgcgccccagccccagcagggcgcacaactttggaagtctcgcggcgctccgagaggcggcagagtccgcgccccagccccgggccgggccgggccagaaccgcagcgtctgggggaagccagagagtcggtaatcgcttcggggatgtaaggcgacagacataggacccccgagctcgcatcagcacccttcggctgcctcccggggtgggggcgggccccgcacacggtaagacctcttgctttcgctcaggctcaagattcaagatacagatattgatatgtatatatatatttaatttcctgtcatccttccaagttatcaggccaccgatgatttttgttctcccttcttgaagaataaatctctctttacccatcggctctccctactctctcccgccgcttagaaataaaacttggctgtattaggagctcggagcaagaaggcgcccaccgagagcgtctgaagcgcgagccaggcgcagttcgcgggacccgggccatgggccgctagcggtcctccagttcgggcccggcctccctgcggccccctccctatgtgagccgcagccaggcgagcggggcgccggaggaagaggaggacccacgggcgccgggccggaaggcagctggcagcaggcccaggccagcgggcgcccgcgttcatgttccgccaggagcagccgttggccgagggcagctttgcgcccatgggctccctgcagccggacgcgggcaacgcgagctggaacgggaccgaggcgccggggggcggcgcccgggccaccccttactccctgcaggtgacgctgacgctggtgtgcctggccggcctgctcatgctgctcaccgtgttcggcaacgtgctcgtcatcatcgccgtgttcacgagccgcgcgctcaaggcgccccaaaacctcttcctggtgtctctggcctcggccgacatcctggtggccacgctcgtcatccctttctcgctggccaacgaggtcatgggctactggtacttcggcaaggcttggtgcgagatctacctggcgctcgacgtgctcttctgcacgtcgtccatcgtgcacctgtgcgccatcagcctggaccgctactggtccatcacacaggccatcgagtacaacctgaagcgcacgccgcgccgcatcaaggccatcatcatcaccgtgtgggtcatctcggccgtcatctccttcccgccgctcatctccatcgagaagaagggcggcggcggcggcccgcagccggccgagccgcgctgcgagatcaacgaccagaagtggtacgtcatctcgtcgtgcatcggctccttcttcgctccctgcctcatcatgatcctggtctacgtgcgcatctaccagatcgccaagcgtcgcacccgcgtgccacccagccgccggggtccggacgccgtcgccgcgccgccggggggcaccgagcgcaggcccaacggtctgggccccgagcgcagcgcgggcccggggggcgcagaggccgaaccgctgcccacccagctcaacggcgcccctggcgagcccgcgccggccgggccgcgcgacaccgacgcgctggacctggaggagagctcgtcttccgaccacgccgagcggcctccagggccccgcagacccgagcgcggtccccggggcaaaggcaaggcccgagcgagccaggtgaagccgggcgacagcctgccgcggcgcgggccgggggcgacggggatcgggacgccggctgcagggccgggggaggagcgcgtcggggctgccaaggcgtcgcgctggcgcgggcggcagaaccgcgagaagcgcttcacgttcgtgctggccgtggtcatcggagtgttcgtggtgtgctggttccccttcttcttcacctacacgctcacggccgtcgggtgctccgtgccacgcacgctcttcaaattcttcttctggttcggctactgcaacagctcgttgaacccggtcatctacaccatcttcaaccacgatttccgccgcgccttcaagaagatcctctgtcggggggacaggaagcggatcgtgtgaggtttccgctggcgcccgcgtagactcacgctgactgcaggcagcggggggcatcgaggggtgcttagccccagggcactcagaaacccgggcgctgcctgctctgcgtttcctcgtctggggtggctctgcagcctcctgcgggcgggcgtctgctgctcctacaagggaagcttcttgctgccaggcccacacatccccagttgttggtttggccactcttgacctggagccatcttcctagtgggccacccctaatcactattgcttcctaaaggtattttcaccctcttcgcctggtacagccctcacagctcttcagagcaagcactggactacaagggcatggctcacaaaaggttaatggatgggggttacctagccctggctaattccccttccattcccaactctctctctctttttgaagaaaaatgctaagggcagccctgcctgccctccccatcccccgctgtaaatatacactatttttgatagcacacatggggcccccatatctcttggccttggttttgatgttgaaatcctggccttgggagagatgccttccaggcagacacagctgtctggttcaggccaagcccctttgcaatgcaagccctttctggtgttatgaagtccctctatgtcgtcgttttcaccagcaactggtgactgtcccttcgacacggacctgctttgagatttcctgacagggaaaagatttctgtccatttttttcctgtgcctaacagcataattgccttttcctatgtaaatattatgatggtggatcaagacataagtaaatgagcctttctgcctcacatcagccctgtgtataaagccattattctctgatgcactgtttgccccagtaactcactttaaaacctctctttccagtgttccctctctccctccagggccactgcttgaagaagaatatgtatgtttctatcttgtatgtctgtgtgcccctcctgccccgaaagtgctgactatggggaaatcttttagctgctgtttttagactccaaggagtggaaattatgtggaagaagcaaacctgatacaatttgcccaaggtaaacagtttgaaaagacaaatgggcctgccaaactgtacagtttcttccccaagagctgttaggtatcaaaatgttgtcctttcccccctccgtgcttttctggttgagatcatgtcattgatgaactgccaaagtcaggggaggagggcagagactttgtgtttacatctgcatttctacatgttttagacagagacaatttaaggcctgcactcttatttcactaaagaaaaactaatgtcagcacatgttgctaatgacagtggatttttttttaaataaaaaagtttacagatcaaatgtgaaataaatatgaatggagtggtcaaa

SEQ ID NO: 332 - protein, 450 aa, Homo sapiens
MGSLQPDAGNASWNGTEAPGGGARATPYSLQVTLTLVCLAGLLMLLTVFGNVLVIIAVFTSRALKAPQNLFLVSLASADILVATLVIPFSLANEVMGYWYFGKAWCEIYLALDVLFCTSSIVHLCAISLDRYWSITQAIEYNLKRTPRRIKAIIITVWVISAVISFPPLISIEKKGGGGGPQPAEPRCEINDQKWYVISSCIGSFFAPCLIMILVYVRIYQIAKRRTRVPPSRRGPDAVAAPPGGTERRPNGLGPERSAGPGGAEAEPLPTQLNGAPGEPAPAGPRDTDALDLEESSSSDHAERPPGPRRPERGPRGKGKARASQVKPGDSLPRRGPGATGIGTPAAGPGEERVGAAKASRWRGRQNREKRFTFVLAVVIGVFVVCWFPFFFTYTLTAVGCSVPRTLFKFFFWFGYCNSSLNPVIYTIFNHDFRRAFKKILCRGDRKRIV

SEQ ID NO: 333 - DNA, 4146 bp, Homo sapiens
cggtccgttgttcatttgccattcgacctccgccagggcctggtcggacggaaacgctccgccggctttattgtcgcttcgttatgtggcggagccgagcagtttagcgtgcctctcaccctcagcgcctgcgaagccggcggcggcgtcgggactcctcggcgcgcggaggaaggatatctgtgtggaggatcggtgtgtgcgcgcgcggctttaaagagggggcagcggagggtctccccgcactccgctgctcaacttcgaaggcctcgctcgctgcaggctcgctcctcacctctccgccgcccgcccccttctccgcgcgggacgctgcccggagcgcggcggggcgggggtggaggacgagagagcggtcggaggcgtcggcccggcagcggcagcggcagcggacgcgtgcagcagacccgggagcgagcgcgagccgggctgccgggcgagagggcgaggccgagccccgcgagaccggaacgccgggggcgggggcgagacagagggggagccgcggggagcgcgcgggacgcggcccgaggccgtgcgcgagccggggcaccgggcggcggcggcggcggcgcgcgccatgtcgttcagtgaaatgaaccgcaggacgctggcgttccgaggaggcgggttggtcaccgctagcggcggcggctccacgaacaataacgctggcggggaggcctcagcttggcctccgcagccccagccgagacagcccccgccgacagcgccgcccgcgcttcagccgcctaatgggcggggggccgacgaggaagtggaattggagggcctggagccccaagacctggaggcctccgccgggccggccgccggcgccgccgaggaagccaaggagttgctgctcccccaagacgcgggcggccccacctcgcttggcggtggcgcggggggccccctgctagcggaaaggaaccgtcggactctggccttccgaggcggcggcggcgggggtctcggcaacaatggcagtagccgcggccgccccgagacctcggtgtggcccttgaggcatttcaatgggcgagggccggcgactgtggatctggagctggacgcgctggaggggaaggagttgatacaggacggcgcgtccctgagcgacagcaccgaggacgaggaggagggggcgagcctgggcgacggcagcggggcggaaggcggcagctgcagcagcagcaggcggtcgggcggcgatggcggggacgaagtggagggcagcggtgtgggagctggcgaaggagagactgtccagcacttcccgctcgcgcggcccaagtctctaatgcagaagctccaatgctccttccagacctcctggctcaaggactttccctggctgcgctattccaaggatactggtcttatgtcttgcggctggtgccaaaagacccctgcagatgggggaagcgtggaccttcccccagtggggcatgatgagctttcgcgagggacccgcaactacaagaaaaccctcctcctgaggcaccacgtctctaccgagcacaaactccacgaagccaacgccccagagtcagaaataccatcagaggaggggtactgggactttaataggaggccaaatgagaactcttattgctatcaacttctgcgacaactaaatgaacagagaaagaaaggtattctttgtgatgtcagcattgtggtaagcggaaaaatcttcaaagctcataagaacatcctggttgcaggcagccgtttctttaagactttatattgcttttcaaacaaagaaagccctaaccaaaacaatactacccacttagatattgctgcagttcaaggtttttcagtcatcttggacttcttgtattctggtaacctggtgctcacaagccaaaatgccattgaagttatgaccgtggccagctatcttcaaatgagtgaagttgttcaaacttgccgaaatttcattaaagatgccttaaatataagcattaaatcagaagctccagagtctgtagttgtggactataataatagaaaaccagttaatagagatggtctgtcttcatcacgggatcaaaaaattgccagtttttgggcaacacggaatcttaccaatttggcaagtaatgtaaagattgaaaatgatggttgtaatgtcgacgagggccaaatagaaaactaccaaatgaatgacagtagttgggtccaggatggatctcctgaaatggctgaaaatgaatctgaaggtcaaacaaaagtgtttatttggaataatatgggctcccagggaattcaagagactggcaaaacaaggaggaaaaaccaaactacaaaaagatttatttataatattccacctaataatgaaacgaatttagaagattgctcagtaatgcagccacctgttgcctatccagaagaaaatacactactcatcaaggaagaaccagatttagatggtgctctactctcggggccagatggtgataggaatgtgaatgcaaatttattggctgaagctggcactagtcaagatggaggtgatgctggtacttcacatgatttcaagtatggtttgatgcctggtccttcaaatgatttcaagtatggattattgccagaatcttggccaaaacaagaaacctgggaaaatggtgaatcatctctaatcatgaacaagttaaaatgccctcattgtagctatgtagccaaatacagacgaacactaaaaaggcacttgctcattcacacaggagtgagatcatttagctgtgatatttgtggaaaactgtttactcgaagagaacatgtaaaaagacattccctggtgcataaaaaggataaaaaatacaaatgtatggtgtgtaagaagatcttcatgttagcagccagtgttggaataagacatggatctcgacgttatggtgtttgtgtagactgtgcagataaatcacagccaggagggcaagaaggtgtagatcagggacaggatacagaattccctcgggatgaagaatacgaggagaatgaagtaggagaagctgatgaagagctagttgatgatggagaagatcagaatgatccctctcgatgggatgaatcaggagaagtttgtatgtctctagatgattaactgacctactatactcctcaaggatgctgcatttggacctaatatgaatcgacaatttggattgttgaacttgaaggcttgcaaaatatggtacatgctggatagtagttatgttgctgtgaaaactgtagggtcaaagccttatagcaaaaaaaatttttttttatatttgcacaggactatacagcaaacaaccatgtggttggattacatggagtccccacatactcagtcagttatcaaagtaaaatattttttatttataggatatacagtaactatttgggtcctatgaaaatagtccttaaagagcttacattcatgtgctactttaacatgaatggagaaaatccgtttatggaagtacagtgacaattgacccaatcactctgtccatcaaaccactcaggctagtttgtactagtagagttttgtttctatttttatttttattaattttattttttttaatacagattttcagtgaggggctttttcaatcccattggttctattttcttgtatttttccatttaatttgcttcataacttaaaccaagtctcttctagtcttaggtattatttctcgattttgtgctgatgggcatgtttataagaactggagaggtaatttattggaatgaactaactgacttcctccattcccctcttcctttttgacatgaattttactacttcacaaatgaagaatgatgttatgaagttagcttggcggagttgacaaataccactaaaatgattatgatttagaagtaactttcttctgctgctctaatctgataaatggttactatatgatattttctgacatggtatttggttttgggtatctgttactttggcactattcttgtttgcctctttatttttgccagtgtactatacctcagtcctatttgaaagacctaattgaaagaaaaatcatagaaataagtaaaatgatttgttttataatttatccaccatgtccagtttggttagct

SEQ ID NO: 334 - protein, 847 aa, Homo sapiens
MSFSEMNRRTLAFRGGGLVTASGGGSTNNNAGGEASAWPPQPQPRQPPPTAPPALQPPNGRGADEEVELEGLEPQDLEASAGPAAGAAEEAKELLLPQDAGGPTSLGGGAGGPLLAERNRRTLAFRGGGGGGLGNNGSSRGRPETSVWPLRHFNGRGPATVDLELDALEGKELIQDGASLSDSTEDEEEGASLGDGSGAEGGSCSSSRRSGGDGGDEVEGSGVGAGEGETVQHFPLARPKSLMQKLQCSFQTSWLKDFPWLRYSKDTGLMSCGWCQKTPADGGSVDLPPVGHDELSRGTRNYKKTLLLRHHVSTEHKLHEANAPESEIPSEEGYWDFNRRPNENSYCYQLLRQLNEQRKKGILCDVSIVVSGKIFKAHKNILVAGSRFFKTLYCFSNKESPNQNNTTHLDIAAVQGFSVILDFLYSGNLVLTSQNAIEVMTVASYLQMSEVVQTCRNFIKDALNISIKSEAPESVVVDYNNRKPVNRDGLSSSRDQKIASFWATRNLTNLASNVKIENDGCNVDEGQIENYQMNDSSWVQDGSPEMAENESEGQTKVFIWNNMGSQGIQETGKTRRKNQTTKRFIYNIPPNNETNLEDCSVMQPPVAYPEENTLLIKEEPDLDGALLSGPDGDRNVNANLLAEAGTSQDGGDAGTSHDFKYGLMPGPSNDFKYGLLPESWPKQETWENGESSLIMNKLKCPHCSYVAKYRRTLKRHLLIHTGVRSFSCDICGKLFTRREHVKRHSLVHKKDKKYKCMVCKKIFMLAASVGIRHGSRRYGVCVDCADKSQPGGQEGVDQGQDTEFPRDEEYEENEVGEADEELVDDGEDQNDPSRWDESGEVCMSLDD

SEQ ID NO: 335 - DNA, 3938 bp, Homo sapiens
ttgtcacaccgacctgcaccatctctcgcctgcctgtggggtttctgtcaactagtcgtggagggaaggagactctttaaagaataacatcttattgtggccatgccagaacccactaagaaagaggaaaatgaagtgccagccccagccccacccccggaagaaccaagtaaagagaaggaggccggaactacaccagcaaaagatgaagaggaagtctccccgcctagcgccttgcctccaggtttgggtagtcgggccctggagagaaaagattcagactggacccttgtcgaaactcctcctggggaggaacaagccaagcagaatgccaactcccagctgtccatcttgttcattgaaaaacctcaaggaggaacagtgaaagttggtgaagatatcaccttcatagccaaagtcaaggctgaagatcttctgagaaaacccactatcaaatggttcaaaggaaaatggatggacctggccagcaaagccgggaagcaccttcagctgaaggaaacctttgagaggcacagtcgggtgtacacatttgagatgcagatcatcaaggccaaagataactttgcaggaaattacagatgcgaggtcacctataaggataagtttgacagctgttcatttgatcttgaagtgcacgaatctactgggactactccaaacattgacatcagatctgctttcaagagaagtggagaaggtcaagaggatgcaggagaacttgactttagtggtctcctgaaacgtagggaggtgaagcagcaggaggaagaaccccaggtggacgtatgggagttgctgaagaacgcgaaacccagtgagtacgagaagatcgccttccagtatggaatcaccgacctgcgcggcatgctcaagcgactcaagcgcatgcgcagagaggagaagaagagcgcagcttttgcaaaaattcttgatcctgcatatcaggttgacaaaggaggcagagtgaggtttgttgtggagctggcagatccaaagttggaggtgaaatggtataaaaatggtcaagaaattcgacccagtaccaaatacatctttgaacacaaaggatgccagagaatcctgtttatcaataactgtcagatgacagatgattcagagtattatgtgacagccggtgatgagaaatgttccactgagctcttcgtaagagagcctccaattatggtgaccaaacagctggaagatacaactgcttattgtggggagagagtggaattagaatgtgaggtgtctgaagatgatgccaatgtaaaatggtttaagaatggtgaagagattatccctggtccaaaatcaagataccgaattagagttgagggtaaaaaacacatcttgatcatagagggagcaacaaaggctgatgctgcagaatattcagtaatgacaacaggaggacaatcatctgctaaacttagtgttgacttgaaacctctgaagattttgacacctctgactgatcagactgtaaatcttggaaaagaaatctgcctgaagtgtgaaatctctgaaaacataccaggaaaatggactaaaaatggcctacctgttcaggagagtgaccgtctaaaggtggttcacaagggaaggatccacaagttagtgatagccaatgccctcactgaagatgaaggtgattatgtatttgcacctgatgcctacaatgttactctgcctgccaaagttcatgttattgatcctcctaagatcatcctggatggtcttgatgctgacaacacagtgacagtgattgcaggaaacaagcttcgtcttgagatccccatcagcggagaaccacctcctaaagccatgtggagccggggagataaggctattatggaaggcagtggccggataagaacagaatcttaccctgatagcagcactctggtcattgatatagctgaaagagatgactctggtgtttaccacatcaatctgaaaaacgaagctggagaggcacatgcaagcatcaaggttaaagttgtggacttccctgatcctccagtggcaccgactgtgacagaggtgggagatgactggtgtatcatgaactgggagcctcctgcctacgacggaggctctccaatcctaggatattttattgagaggaagaagaaacaaagctccaggtggatgaggctgaattttgatctctgcaaagaaacaacttttgagcccaagaagatgattgaaggtgtggcctatgaggtccgcatctttgcagtcaatgccattggcatctccaagcccagtatgccctccaggccttttgttcctttggctgtaacaagccctcctactcttctgactgtggactctgtcactgacacgactgtcacgatgaggtggcgccccccagaccacattggtgcagcaggtttagatggctatgtgctagagtattgctttgaaggaactgaggactggatagttgcaaacaaagatctgattgacaagacgaagttcaccatcacaggtctgccaacagatgcaaagatctttgtgcgtgtgaaggctgttaatgcagctggtgccagcgagcccaagtactattctcagcccattctcgtgaaggaaatcatagaacctccaaagattcgcattccaagacacctgaagcaaacctatatccgcagagttggagaagctgtcaatctggttatacctttccagggaaaaccaagaccagaattaacttggaagaaggatggtgcagaaattgataagaatcaaataaacattcgcaactctgagactgatacaatcatatttattagaaaagcagagaggagccactctgggaaatatgatctgcaagtcaaagtggacaaattcgtggagaccgcatcaattgacatccagatcattgaccgtccaggtccaccccaaattgtgaagattgaggatgtctggggagaaaatgtcgctctcacatggactccaccaaaggatgatggaaatgctgctatcacaggctataccattcagaaggctgacaagaagagcatggaatggtttactgtcattgagcattatcatcgaaccagtgccaccattactgaattggtcatagggaatgaatattacttccgggtcttttctgaaaacatgtgtggcctcagtgaggatgccaccatgactaaagagagtgcagtgatcgccagggatggtaaaatctacaaaaatccagtgtatgaagactttgatttctcagaggcacccatgtttactcagcctttggttaacacctatgccatagctggttacaatgccaccctaaactgcagtgtgagaggaaatcctaagcctaaaataacctggatgaaaaacaaagttgctattgtggatgatccaagatacaggatgttcagcaaccagggagtctgtaccctggaaattcgcaagcccagcccctatgatggaggcacttactgctgcaaagcagtcaatgaccttgggacagtggagattgaatgcaaactggaggtgaaagtgatatatcaaggagtaaatacccctggacaaccagtcttcctggaggggcagcaacagtcattgcacaataaggatttttgaatgtataatatcatctaaggtgggctctccttctgcagactcctcttgcaaggcgtacctccaaacataattgattcgtatctgcgagacttacactcaagcaatcctgaggaatactgagggagggcctggctactgtctctctgcactctgctgctttgaaatctggttgaaatgagaaaaagcattttctgttttcccaccaggcccccaagtgtggtctttttctttcctcctaatgttgaagagaaaaaaaaaaaaaaaagtttgcccagattgcttaattaaaaattgcaaacaaaatctcatttgaagtcaaa

SEQ ID NO: 336 - protein, 1171 aa, Homo sapiens
MPEPTKKEENEVPAPAPPPEEPSKEKEAGTTPAKDEEEVSPPSALPPGLGSRALERKDSDWTLVETPPGEEQAKQNANSQLSILFIEKPQGGTVKVGEDITFIAKVKAEDLLRKPTIKWFKGKWMDLASKAGKHLQLKETFERHSRVYTFEMQIIKAKDNFAGNYRCEVTYKDKFDSCSFDLEVHESTGTTPNIDIRSAFKRSGEGQEDAGELDFSGLLKRREVKQQEEEPQVDVWELLKNAKPSEYEKIAFQYGITDLRGMLKRLKRMRREEKKSAAFAKILDPAYQVDKGGRVRFVVELADPKLEVKWYKNGQEIRPSTKYIFEHKGCQRILFINNCQMTDDSEYYVTAGDEKCSTELFVREPPIMVTKQLEDTTAYCGERVELECEVSEDDANVKWFKNGEEIIPGPKSRYRIRVEGKKHILIIEGATKADAAEYSVMTTGGQSSAKLSVDLKPLKILTPLTDQTVNLGKEICLKCEISENIPGKWTKNGLPVQESDRLKVVHKGRIHKLVIANALTEDEGDYVFAPDAYNVTLPAKVHVIDPPKIILDGLDADNTVTVIAGNKLRLEIPISGEPPPKAMWSRGDKAIMEGSGRIRTESYPDSSTLVIDIAERDDSGVYHINLKNEAGEAHASIKVKVVDFPDPPVAPTVTEVGDDWCIMNWEPPAYDGGSPILGYFIERKKKQSSRWMRLNFDLCKETTFEPKKMIEGVAYEVRIFAVNAIGISKPSMPSRPFVPLAVTSPPTLLTVDSVTDTTVTMRWRPPDHIGAAGLDGYVLEYCFEGTEDWIVANKDLIDKTKFTITGLPTDAKIFVRVKAVNAAGASEPKYYSQPILVKEIIEPPKIRIPRHLKQTYIRRVGEAVNLVIPFQGKPRPELTWKKDGAEIDKNQINIRNSETDTIIFIRKAERSHSGKYDLQVKVDKFVETASIDIQIIDRPGPPQIVKIEDVWGENVALTWTPPKDDGNAAITGYTIQKADKKSMEWFTVIEHYHRTSATITELVIGNEYYFRVFSENMCGLSEDATMTKESAVIARDGKIYKNPVYEDFDFSEAPMFTQPLVNTYAIAGYNATLNCSVRGNPKPKITWMKNKVAIVDDPRYRMFSNQGVCTLEIRKPSPYDGGTYCCKAVNDLGTVEIECKLEVKVIYQGVNTPGQPVFLEGQQQSLHNKDF

SEQ ID NO: 337 - DNA, 2347 bp, Homo sapiens
attcggagctgcctcctcgccaatgattccagcgcctgacagccaggaccccaggcagcagcgagtgacaggacgtctggaccggcgcgccgctagcagctctgccgggccgcggcggtgatcgatggggagcggctggagcggacccagcgagtgagggcgcacagccgggacgccgaggcggcgggcgggagacccgcaccagcgcagccggccctcggcgggacgtgacgcagcgcccggggcgcgggtttgatatttgacaaattgatctaaaatggctgggtttttatctgaataactcactgatgccatcccagaaagtcggcaccaggtgtatttgatatagtgtttgcaacaaattcgacccaggtgatcaaaatgattctcaactcttctactgaagatggtattaaaagaatccaagatgattgtcccaaagctggaaggcataattacatatttgtcatgattcctactttatacagtatcatctttgtggtgggaatatttggaaacagcttggtggtgatagtcatttacttttatatgaagctgaagactgtggccagtgtttttcttttgaatttagcactggctgacttatgctttttactgactttgccactatgggctgtctacacagctatggaataccgctggccctttggcaattacctatgtaagattgcttcagccagcgtcagtttcaacctgtacgctagtgtgtttctactcacgtgtctcagcattgatcgatacctggctattgttcacccaatgaagtcccgccttcgacgcacaatgcttgtagccaaagtcacctgcatcatcatttggctgctggcaggcttggccagtttgccagctataatccatcgaaatgtatttttcattgagaacaccaatattacagtttgtgctttccattatgagtcccaaaattcaacccttccgatagggctgggcctgaccaaaaatatactgggtttcctgtttccttttctgatcattcttacaagttatactcttatttggaaggccctaaagaaggcttatgaaattcagaagaacaaaccaagaaatgatgatatttttaagataattatggcaattgtgcttttctttttcttttcctggattccccaccaaatattcacttttctggatgtattgattcaactaggcatcatacgtgactgtagaattgcagatattgtggacacggccatgcctatcaccatttgtatagcttattttaacaattgcctgaatcctcttttttatggctttctggggaaaaaatttaaaagatattttctccagcttctaaaatatattcccccaaaagccaaatcccactcaaacctttcaacaaaaatgagcacgctttcctaccgcccctcagataatgtaagctcatccaccaagaagcctgcaccatgttttgaggttgagtgacatgttcgaaacctgtccataaagtaattttgtgaaagaaggagcaagagaacattcctctgcagcacttcactaccaaatgagcattagctacttttcagaattgaaggagaaaatgcattatgtggactgaaccgacttttctaaagctctgaacaaaagcttttctttccttttgcaacaagacaaagcaaagccacattttgcattagacagatgacggctgctcgaagaacaatgtcagaaactcgatgaatgtgttgatttgagaaattttactgacagaaatgcaatctccctagcctgcttttgtcctgttattttttatttccacataaaggtatttagaatatattaaatcgttagaggagcaacaggagatgagagttccagattgttctgtccagtttccaaagggcagtaaagttttcgtgccggttttcagctattagcaactgtgctacacttgcacctggtactgcacattttgtacaaagatatgctaagcagtagtcgtcaagttgcagatctttttgtgaaattcaacctgtgtcttataggtttacactgccaaaacaatgcccgtaagatggcttatttgtataatggtgttactaaagtcacatataaaagttaaactacttgtaaaggtgctgcactggtcccaagtagtagtgtcctcctagtatattagtttgatttaatatctgagaagtgtatatagtttgtggtaaaaagattatatatcataaagtatgccttcctgtttaaaaaaagtatatattctacacatatatatatatgtatatctatatctctaaactgctgttaattgattaaaatctggcaaagttatatttactttaaaataaaataattttattgc

SEQ ID NO: 338 - protein, 359 aa, Homo sapiens [sequence omitted]

SEQ ID NO: 339 - DNA, 1920 bp, Homo sapiens
ccacagttcctttccccgatagcttcaaattctctgccttttgaaataagcctacttttaactggaataaataattggtcaatctctacctcaggtgaagaggaaccaagcctctggaaacacttaggaacaaactgtaaaaaccaaaggcaattgtgtaaccggttaaataagcttgctggactttgtccctgtgtatgagttagacaattctttcagctagtttgagtgacgcactgaccagtgaagcgcagtgaagcagtgggaaccggaatatccaaagagtggtttgaaggagaaagaagcattgtggctttatatcctctgggcctgggtttcctgaagtcaccacacatagaggagagagaaaatggctgagttaaagtacatttctggatttgggaatgagtgttcttcagaggatcctcgctgcccaggttccctgccagaaggacagaataatcctcaggtctgcccctacaatctctatgctgagcagctctcaggatcggctttcacttgtccacggagcaccaataagagaagctggctgtataggattctaccttcagtttctcacaagccctttgaatccattgacgaaggccaagtcactcacaactgggatgaagttgatcctgatcctaaccagcttagatggaaaccatttgagattccaaaagcatctcagaagaaagtagactttgtgagtggcctgcataccttgtgtggagctggagacataaagtctaacaatgggcttgctatccacattttcctctgcaatacctccatggagaacagatgcttttacaattcagatggggacttcttgattgttccgcagaaagggaaccttctcatttacaccgagtttggcaagatgcttgtacagcccaatgagatctgcgtcattcagagaggaatgcggttcagcatagatgtctttgaggagaccaggggctacatcttggaggtctatggtgtccactttgagttacctgaccttggaccaattggggccaatggcttggccaatcctcgtgatttcttgatacccattgcctggtatgaggatcgccaagtaccaggtggttacacggtcattaataaataccagggcaagctgtttgctgccaaacaggatgtctccccgttcaatgttgtggcctggcacgggaattatacaccctacaagtacaacctgaagaatttcatggttatcaactcagtggcctttgaccatgcagacccatccattttcacagtattgactgctaagtctgtccgccctggagtggccattgctgattttgtcatcttcccacctcgatggggggttgctgataagaccttcaggcctccttattaccataggaactgcatgagtgagttcatgggactcatccgaggtcactatgaggcaaagcaaggtgggttcctgccagggggagggagtctacacagcacaatgaccccccatggacctgatgctgactgctttgagaaggccagcaaggtcaagctggcacctgagaggattgccgatggcaccatggcatttatgtttgaatcatctttaagtctggcggtcacaaagtggggactcaaggcctccaggtgtttggatgagaactaccacaagtgctgggagccactcaagagccacttcactcccaactccaggaacccagcagaacctaattgagactggaacattgctaccataattaagagtagatttgtgaagatttcttcagaatctcatgctttctggtagtattggaggagggggttggttaaaatgaaaattcacttttcatagtcaagtaactcagaacttttatggaaacgcatttgcaaagttctatggctgtcaccttaattactcaataaacttgctggtgttctgtggacgta

SEQ ID NO: 340 - protein, 445 aa, Homo sapiens
MAELKYISGFGNECSSEDPRCPGSLPEGQNNPQVCPYNLYAEQLSGSAFTCPRSTNKRSWLYRILPSVSHKPFESIDEGHVTHNWDEVDPDPNQLRWKPFEIPKASQKKVDFVSGLHTLCGAGDIKSNNGLAIHIFLCNTSMENRCFYNSDGDFLIVPQKGNLLIYTEFGKMLVQPNEICVIQRGMRFSIDVFEETRGYILEVYGVHFELPDLGPIGANGLANPRDFLIPIAWYEDRQVPGGYTVINKYQGKLFAAKQDVSPFNVVAWHGNYTPYKYNLKNFMVINSVAFDHADPSIFTVLTAKSVRPGVAIADFVIFPPRWGVADKTFRPPYYHRNCMSEFMGLIRGHYEAKQGGFLPGGGSLHSTMTPHGPDADCFEKASKVKLAPERIADGTMAFMFESSLSLAVTKWGLKASRCLDENYHKCWEPLKSHFTPNSRNPAEPN

SEQ ID NO: 341 - DNA, 3327 bp, Homo sapiens
ggaagaggaggggggagaaggaggagctgaagcgggaagagcggcaggcagcggctcggcggagttgcagcagaggcggcggcgacgctgagacaccgcagcttccctgagcgccgagtccctccggggacagcagcagggagcgcccgcgcagccaccgagcctctgcccagccaagccgccgtcgccgcgccgggggaccgccagccatggccgcgccgggggatccgcaggacgagctgctgccgctggccggccccgggtcccagtggctcaggcaccggggggagggggagaacgaagcggtgacgccgaaaggggccacgccggcgccgcaggctggggagcccagcccggggttgggcgccagggcccgggaagcggcgtcgcgggaagccggctcgggccccgcccggcagtcgcccgttgccatggaaactgcatccacaggtgtggcaggtgtttccagtgccatggaccacaccttctcaacaacatcaaaagatggggaaggatcgtgttacacatctctcatttctgacatctgctatccacctcaggaggattctacatattttactggaattcttcagaaggaaaatggccacgtcaccatttcagagagccctgaggagctgggtacacccggcccctccttaccagatgtgcctgggatagagtctcgtggcttatttagttctgattctggaatagagatgactcctgcagagtccacggaagtgaacaagatcttagcagaccctctggaccagatgaaagcagaggcctataaatacattgacataaccagacccgaggaggtgaagcaccaagaacaacatcaccccgagctggaagataaagacttggactttaagaataaagacactgacatctcaattaaacctgaaggagtccgtgaacctgacaaaccagctcctgtggagggaaaaatcatcaaggaccatttattggaagaatccacatttgctccatacatagatgatctctctgaagaacagcgcagggctcctcagatcaccacccctgtcaaaatcacactgacggaaatagaaccttctgttgaaaccactacccaagagaagacccctgagaagcaagatatatgtctaaagccaagtcctgacacagtccccactgtcactgtctcggagcctgaagacgacagcccaggatctatcacccctccatcttctggaacagaaccatctgctgcagaatcccaggggaaaggcagcatctccgaggatgagctgatcaccgccatcaaagaagcaaagggattatcgtatgaaaccgccgagaacccacggccggtgggccagctggccgacaggcccgaggtcaaggccaggtccggaccgccaaccatccccagccccctggaccacgaggccagcagcgcggagtcgggggactcagagatcgagctggtgtccgaggaccccatggccgcggaggacgcgctgccctcaggctatgtgagctttggccacgtgggcggcccgccgccctcgcccgcctcgccatccatccagtacagcatcctgagggaggagcgcgaggccgagctggacagcgagctcatcatcgagtcgtgcgacgcctcctcggcctcggaggagagccccaagcgggagcaggactcacccccgatgaagcccagcgccctggatgccatccgggaggagactggcgtccgggccgaggagcgtgcgccaagccggcggggcctggccgagccgggttccttcctcgactacccctcaactgagccccagcctggccccgagctgccccctggagacggagccctggagcctgagacgcccatgttgccacggaagcctgaagaagactcgagttccaaccaaagtcctgcggccacaaagggccctgggcctctaggtcctggcgccccgcccccactgctgtttctcaataagcaaaaagctattgacctgttgtattggcgggacatcaagcagacgggcatcgtgtttgggagtttcctgctgctgctcttctccctgacccagttcagcgtggtgagcgtcgtggcctacctggccctggccgcactctcagccaccatcagtttccgcatctacaagtctgttttacaagcagtgcagaaaaccgacgaaggccaccctttcaaggcctacttggagcttgagatcaccctttctcaggagcagattcagaagtacacggactgcctgcagttctacgtgaacagcacacttaaggaactgaggaggctcttccttgtccaggacctggtggattccttaaaatttgcagtcctgatgtggctcctgacctacgttggcgctctcttcaatggcctgaccctgctgctcatggctgtggtttcaatgtttactctacctgtagtgtatgttaagcaccaggcacagattgaccaatatctgggacttgtgaggactcacataaatgctgttgtggcaaagattcaggctaaaatcccaggcgctaagaggcacgctgagtaaactgatttcccaccggggactggacacaaacaggaatgtctggagtggtaacagctctcttcttactcattactgcaaattgattgtctttcccccctccctccagtaccataatcttagagacaaaccttaaaacagctgtttttaggctgttccttgtactcttaggatatttgagtcacttgtgtcaaccactaaagtatagagaaaagtgtattagatgtggtttttaattttgtgttgctaaaaaaagtgcatgatggtgagagcccaagttatctttccctcttcggtgttcttcttctcttctctgcaatgcttctgtagcttctaatgttccccgtggctaggcctttcctgccgagtgctctgatgcaatagtggaaatcgcttatatgtccttgggttgctggttggattaatctttaataacaatatatagaattgtagactgatgttttagcatttttccaacacacacaacgtaaaaataaaagcagtcgaccgcacttatggtaatcagttttgtataacttaaaataattaaataaatgaataaatccaaaacaaacatgcagtacttttgttgtatgggattggtgggctgatttacatgtatggttactaaaaagtaccagcatgttaactttattacaatttgtattactttctctgtagttcctaatggattcaattacggactctggatatttgcacttatgtacttgatactgaatgcataaataaatgttactaaatgtagaatgttaaaaaaaaaaaaaaaaaa

SEQ ID NO: 342 - protein, 776 aa, Homo sapiens
MAAPGDPQDELLPLAGPGSQWLRHRGEGENEAVTPKGATPAPQAGEPSPGLGARAREAASREAGSGPARQSPVAMETASTGVAGVSSAMDHTFSTTSKDGEGSCYTSLISDICYPPQEDSTYFTGILQKENGHVTISESPEELGTPGPSLPDVPGIESRGLFSSDSGIEMTPAESTEVNKILADPLDQMKAEAYKYIDITRPEEVKHQEQHHPELEDKDLDFKNKDTDISIKPEGVREPDKPAPVEGKIIKDHLLEESTFAPYIDDLSEEQRRAPQITTPVKITLTEIEPSVETTTQEKTPEKQDICLKPSPDTVPTVTVSEPEDDSPGSITPPSSGTEPSAAESQGKGSISEDELITAIKEAKGLSYETAENPRPVGQLADRPEVKARSGPPTIPSPLDHEASSAESGDSEIELVSEDPMAAEDALPSGYVSFGHVGGPPPSPASPSIQYSILREEREAELDSELIIESCDASSASEESPKREQDSPPMKPSALDAIREETGVRAEERAPSRRGLAEPGSFLDYPSTEPQPGPELPPGDGALEPETPMLPRKPEEDSSSNQSPAATKGPGPLGPGAPPPLLFLNKQKAIDLLYWRDIKQTGIVFGSFLLLLFSLTQFSVVSVVAYLALAALSATISFRIYKSVLQAVQKTDEGHPFKAYLELEITLSQEQIQKYTDCLQFYVNSTLKELRRLFLVQDLVDSLKFAVLMWLLTYVGALFNGLTLLLMAVVSMFTLPVVYVKHQAQIDQYLGLVRTHINAVVAKIQAKIPGAKRHAE

SEQ ID NO: 343 - DNA, 5899 bp, Homo sapiens
tattgcactacatcactgagttcccgtatgccaagttatggccacttacatccacgtcagcaaaactggtgccgagggagctgttcttgacgaagctaaaaatatcaataagtctttgtctgctcttggaaatgtgatctctgctttggcagaagggacaaaaacacatgtgccataccgggacagcaagatgactcggattcttcaggactctttgggtgggaactgcagaaccaccatcgtcatttgctgttctccttctgtcttcaatgaggctgagaccaagtccacactgatgttcggacagagagctaagaccatcaagaatacagtctctgtgaacctagaactgacagcagaagaatggaagaagaaatatgaaaaagagaaagagaaaaacaagactttgaagaatgttatccagcatctggagatggagctaaacaggtggaggaatggagaagctgtgcctgaggatgaacagatcagtgccaaggaccagaagaacctggagccttgtgataacacccccatcatagacaatattgctcctgttgttgctggcatctctacagaggagaaagagaagtacgatgaggagatctccagtctctacagacaactggatgacaaggatgatgaaattaaccagcagagccagctggctgaaaagctgaagcaacagatgttggatcaggatgagcttttagcttccacaagaagagactatgagaagatacaggaggagctgacacgtctccagattgaaaatgaggcagccaaggatgaggtgaaagaagttctccaggccctggaggagctggctgtcaattatgaccagaaatcacaggaagtggaggataagacccgggccaatgagcagctgacagacgagctggcccagaaaacgactacattgacaaccacacagagagagctgagccagctacaagagcttagcaaccaccagaagaaaagggcaactgagatcctgaatttgctgttgaaagatctgggggagataggtggaattattggcaccaatgatgtgaaaactttggcagatgtgaatggagtcattgaggaggagtttaccatggcccgcctgtacatcagcaagatgaagtcagaggtcaagtccctggtgaaccgcagcaaacagctcgagagcgcccagatggactccaacaggaagatgaatgccagcgagcgggagctggcagcctgccagctgctcatctcccagcacgaagccaagatcaagtctctgacagactacatgcagaacatggaacagaagaggaggcagctagaagagtcccaggactcgctcagcgaagagctggcaaagctccgagcccaggaaaaaatgcacgaagtcagcttccaggataaggagaaggaacatctgacgcggttgcaggatgctgaagaaatgaagaaggcgctggagcagcagatggagagccaccgggaagctcaccagaagcagctgtccagactccgagacgaaattgaggagaagcagaaaatcattgatgagattcgggatttgaatcagaaactgcaactggaacaggagaagcttagttctgattataacaagctgaaaatagaggaccaagagagagaaatgaagctggaaaagctcttattgctcaacgataaaagggaacaagccagagaagacctcaaagggctggaggagacagtgtctagagaattgcagacactgcacaaccttcggaaactctttgtccaggatctgaccacccgagttaaaaaaagtgtggagttggacaacgatgatggagggggcagtgctgcccagaagcagaaaatttccttcttggagaataacctggagcagctcaccaaagttcacaagcagctggtccgggacaacgcagacctgcgctgtgaactgcccaagctggagaagcggctgcgtgccacggcggagcgcgtcaaggctctggagagcgcgctgaaggaggccaaggagaacgccatgcgggaccgtaagcgctaccagcaggaggtggatcgtatcaaggaggccgtgcgggccaagaacatggccagaagggcccattcagcccagatcgccaagcccatccgccccggacactacccggcctcatctccaacggccgtccatgccattcgagggggaggaggcagctcttcaaattccactcactaccagaaataaatacaaaatatgactccacgtagcatgtcaaggactacattaatcaccaattcctttatttttccccccctacagtttccattttttttttatacttgcttactccagccatctgcagtacaccagtttcaggtcttttgagctgtgtagagtttctgtgtgtacagatgtgtgctcggacttttctctttttgagaaatctgaaggagatggttgcagaagatccacttactactgagaaccattaccaccgactcggcctccggggtgttgggtggtttctgggtggttcctggagcctcctctgggcagtgcactgtcccatctgtacgccctaatgtgccattccctagaggggaacaaccaagtgccgtggaggcagatgatcatggtctgcctcaactgtctggtttcctgtaaaataaacacattgttttatatttttagggaacaaaaagtgctgctatagggttcaaagttttccttctgaacacttttccgaaacaaattaccccaaagacacattttgaatatcctggtcacatctttggatctgtaaaatataccttttagtatggcacctgttaaaatgcaaagcaaatttctttggggcagaaaaacaatctgacagtagcagtgtagaatttgttcattcaaatacatctgtgtaaatgcaaaaagtcataaaattcacctccgagctgcttgcttttgaacctgcagcaactagtcttagccggcccggtttgaacatcgttctttcagaagtgctgaaaatgctgcaaagttggataagtggaaatgtggctgcccctctcctcactacttcctctctgatcgttctgaagcttgcattgggaatggctgctttctctaaccattttcagcttgagtgggtattgctgaagaaatccaacatcattccagcagttgaaaaaggaagccttcgggagaaagtgcttgtcaaaattttgttctttgtgcttgtgtatgagtaagttgccatgaataagttattattttaacccataattggcgactgtttatatgaattctttctttggcaccaaataggtttcatcttcttaggcacaattagaaaaaatccacatagatggatattttacatttagttattgctttatccaaatacatgaatctaaagctgaatcaacccttacttccagttgtgcttattaagaagatcaatttccaagtagtaaagttttcagggaaactgactgtgctgctatttgttttgacaaatttgggggtaagtcaatgacaaccaaaccaatctcggtggaaactcctatcctatcatgttgtgtgcccaagatgagtgagctggcactgtgccctgaagctttcaccactgtaatgaaatatatgccaggggagactttgggcttttctcatgactgtgtgggtcgaaggtagctcaagtgtgtgtgtgtgtgtgtgtgtgtgtgtgtgtgtgtgtgtgtgtgtatgtgtgtaaagtgctaagaactgtgcattgacatccaaacatttcttgtacaaaatttccctagcaaagcaaacctgctttgacttaatttatttgttaaatgttgcactttgtttatgtatgttttgtttttggtggggaataaggagagagaggacgacaaattctattgaagtatttattttgtgaagatggcaattttgcatttgtttaaatttttttcattctttaattttgttatcagtgccagcccaatatacctgctctaccattatttgcggtctgataaaagggtccttgtggggcaggttttgcaaagcttatcaggtaataacatatgccacataaccttgttgatatgtttgcttctgatttgggaagctaaacattggtgtttgagaggattgccaattattaattgtcattaccactactctccattactttttgtttggaaattgaacaaaggtcagtaatggtttttggctcttgttaatatccatcataaaatagattgttttagattctttccagggtgatttttccctgggtaccccgtttctacttctaaagaattgcttggcactttcatgtttcaaagggaaacattcgcttgtagttccattttacttgatctctacaagggactgacaacatttgctttacttttattcacagagaaagttggctttgatgtctcttaaagataattctgctagttgctgatcagccagtcagttcacctagcttcaatctttataggacttctaatctaattttcctatagtgtgactaaaagggaggcaaattattggaacggattattcaaatggatccttaaatattgctatgtataataagccagttattatatcaggaccatgttctctgtaggccactttctaaaaaagccacatatgtgcaattttcaggtttttagactattgctccctgtactttaaatgtaaaaaccacacttctgaacaactaagctcatgaatatgattttggttatatgcagcttttgactagcatgtattgtgtctttttctcctctatgaataattttatatttcatgctacttcttgaaagtttactctttgatgctctaagagaacagccagatggtttatatgaataatctttatctgcaggatggtggattggtaaattaggagaatgttgtttgagatatcaagatttatgtctgggaactaaaatatataatgccaaatgtgtttttgtcaattactagagaattctgtgcaaacatatcatctcttcaaatgctgcacactttgcttttgttaaacagcaggtagtagacagaacaataacagtttcgcgttaagacttttaaaggaaatagaatcgtgattaagaaatcagaatttatagatatattgggataaatgaagaaataaaaatgtttgtctagaatgtagcatctagtgactttttaaagccctaacgtttacataaagaagctctagttcttatagaaataacaaagcaaataaaagttcttaacaatcccctctttcgaagtgcatttttttaaagcagggcaggagacatttggactctagctatatgacatactgggaaaggcagagggtggagggaagatttcacttcattgtctagcccagaatcttgagcaagctaaagaaaccatcataatctaaaattgcttcatttaacactaacaatttagactttttaaaccaagcattgaataatggctggataactgccgaagtaagcgccgctccatgaagtctgcttacttatttaaaaattgtgtatcagttttaaatactgttcattgtgtgcagatataaggggaatagggcattctgtagaattatacatgtctagtttgtaaagtgtgtcctgtgtactgcagatgtgtgttctctgggctttatgtatctgtacagtagctttcacattaaaaaaattgtggacaaacttgtccggggggtttgaggggagaatggtggtttatatcaataacgatgctgtactatagtccatgtaacaaaagatctggaagtcaccctcctctggcccacggaaaattttggtaatcttctaggttctaaaatgaagatgtatgggtactctggcagactgcatgttgtataatttgaaaaatactaaaagtggaaaataaaattgaattaaa

SEQ ID NO: 344 - protein, 725 aa, Homo sapiens
MATYIHVSKTGAEGAVLDEAKNINKSLSALGNVISALAEGTKTHVPYRDSKMTRILQDSLGGNCRTTIVICCSPSVFNEAETKSTLMFGQRAKTIKNTVSVNLELTAEEWKKKYEKEKEKNKTLKNVIQHLEMELNRWRNGEAVPEDEQISAKDQKNLEPCDNTPIIDNIAPVVAGISTEEKEKYDEEISSLYRQLDDKDDEINQQSQLAEKLKQQMLDQDELLASTRRDYEKIQEELTRLQIENEAAKDEVKEVLQALEELAVNYDQKSQEVEDKTRANEQLTDELAQKTTTLTTTQRELSQLQELSNHQKKRATEILNLLLKDLGEIGGIIGTNDVKTLADVNGVIEEEFTMARLYISKMKSEVKSLVNRSKQLESAQMDSNRKMNASERELAACQLLISQHEAKIKSLTDYMQNMEQKRRQLEESQDSLSEELAKLRAQEKMHEVSFQDKEKEHLTRLQDAEEMKKALEQQMESHREAHQKQLSRLRDEIEEKQKIIDEIRDLNQKLQLEQEKLSSDYNKLKIEDQEREMKLEKLLLLNDKREQAREDLKGLEETVSRELQTLHNLRKLFVQDLTTRVKKSVELDNDDGGGSAAQKQKISFLENNLEQLTKVHKQLVRDNADLRCELPKLEKRLRATAERVKALESALKEAKENAMRDRKRYQQEVDRIKEAVRAKNMARRAHSAQIAKPIRPGHYPASSPTAVHAIRGGGGSSSNSTHYQK

SEQ ID NO: 345 - DNA, 5821 bp, Homo sapiens
gctttgcccagtagttggaaagtgaactcgactcgtgatggttctcctgtcactttggttgatagcagccgctctggtagaggttaggacttcagctgatggacaagctggtaatgaagaaatggtgcaaatagatttaccaataaagagatatagagagtatgagctggtgactccagtcagcacaaatctagaaggacgctatctctcccatactctttctgcgagtcacaaaaagaggtcagcgagggacgtgtcttccaaccctgagcagttgttctttaacatcacggcatttggaaaagattttcatctgcgactaaagcccaacactcaactagtagctcctggggctgttgtggagtggcatgagacatctctggtgcctgggaatataaccgatcccattaacaaccatcaaccaggaagtgctacgtatagaatccggaaaacagagcctttgcagactaactgtgcttatgttggtgacatcgtggacattccaggaacctctgttgccatcagcaactgtgatggtctggctggaatgataaaaagtgataatgaagagtatttcattgaacccttggaaagaggtaaacagatggaggaagaaaaaggaaggattcatgttgtctacaagagatcagctgtagaacaggctcccatagacatgtccaaagacttccactacagagagtcggacctggaaggccttgatgatctaggtactgtttatggcaacatccaccagcagctgaatgaaacaatgagacgccgcagacacgcgggagaaaacgattacaatatcgaggtactgctgggagtggatgactctgtggtccgtttccatggcaaagagcacgtccaaaactacctcctgaccctaatgaacattgtgaatgaaatttaccatgatgagtccctcggagtgcatataaatgtggtcctggtgcgcatgataatgctgggatatgcaaagtccatcagcctcatagaaaggggaaacccatccagaagcttggagaatgtgtgtcgctgggcgtcccaacagcaaagatctgatctcaaccactctgaacaccatgaccatgcaatttttttaaccaggcaagactttggacctgctggaatgcaaggatatgctccagtcaccggcatgtgtcatccagtgagaagttgtaccctgaatcatgaggatggtttttcatctgcttttgtagtagcccatgaaacgggccatgtgttgggaatggagcatgatggacaaggcaacaggtgtggtgatgagactgctatgggaagtgtcatggctcccttggtacaagcagcattccatcgttaccactggtcccgatgcagtggtcaagaactgaaaagatatatccattcctatgactgtctccttgatgacccttttgatcatgattggcctaaactcccagaacttcctggaatcaattattctatggatgagcaatgtcgttttgattttggtgttggctataaaatgtgcaccgcgttccgaacctttgacccatgtaaacagctgtggtgtagccatcctgataatccctacttttgtaagactaaaaagggacctccacttgatgggactgaatgtgctgctggaaaatggtgctataagggtcattgcatgtggaagaatgctaatcagcaaaaacaagatggcaattgggggtcatggactaaatttggctcctgttctcggacatgtggaactggtgttcgtttcagaacacgccagtgcaataatcccatgcccatcaatggtggtcaggattgtcctggtgttaattttgagtaccagctttgtaacacagaagaatgccaaaaacactttgaggacttcagagcacagcagtgtcagcagcgaaactcccactttgaataccagaataccaaacaccactggttgccatatgaacatcctgaccccaagaaaagatgccacctttactgtcagtccaaggagactggagatgttgcttacatgaaacaactggtgcatgatggaacgcactgttcttacaaagatccatatagcatatgtgtgcgaggagagtgtgtgaaagtgggctgtgataaagaaattggttctaataaggttgaggataagtgtggtgtctgtggaggagataattcccactgccgaaccgtgaaggggacatttaccagaactcccaggaagcttgggtaccttaagatgtttgatataccccctggggctagacatgtgttaatccaagaagacgaggcttctcctcatattcttgctattaagaaccaggctacaggccattatattttaaatggcaaaggggaggaagccaagtcgcggaccttcatagatcttggtgtggagtgggattataacattgaagatgacattgaaagtcttcacaccgatggacctttacatgatcctgttattgttttgattatacctcaagaaaatgatacccgctctagcctgacatataagtacatcatccatgaagactctgtacctacaatcaacagcaacaatgtcatccaggaagaattagatacttttgagtgggctttgaagagctggtctcagtgttccaaaccctgtggtggaggtttccagtacactaaatatggatgccgtaggaaaagtgataataaaatggtccatcgcagcttctgtgaggccaacaaaaagccgaaacctattagacgaatgtgcaatattcaagagtgtacacatccactctgggtagcagaagaatgggaacactgcaccaaaacctgtggaagttctggctatcagcttcgcactgtacgctgccttcagccactccttgatggcaccaaccgctctgtgcacagcaaatactgcatgggtgaccgtcccgagagccgccggccctgtaacagagtgccctgccctgcacagtggaaaacaggaccctggagtgagtgttcagtgacctgcggtgaaggaacggaggtgaggcaggtcctctgcagggctggggaccactgtgatggtgaaaagcctgagtcggtcagagcctgtcaactgcctccttgtaatgatgaaccatgtttgggagacaagtccatattctgtcaaatggaagtgttggcacgatactgctccataccaggttataacaagttatgttgtgagtcctgcagcaagcgcagtagcaccctgccaccaccataccttctagaagctgctgaaactcatgatgatgtcatctctaaccctagtgacctccctagatctctagtgatgcctacatctttggttccttatcattcagagacccctgcaaagaagatgtctttgagtagcatctcttcagtgggaggtccaaatgcatatgctgctttcaggccaaacagtaaacctgatggtgctaatttacgccagaggagtgctcagcaagcaggaagtaagactgtgagactggtcaccgtaccatcctccccacccaccaagagggtccacctcagttcagcttcacaaatggctgctgcttccttctttgcagccagtgattcaataggtgcttcttctcaggcaagaacctcaaagaaagatggaaagatcattgacaacagacgtccgacaagatcatccaccttagaaagatgagaaagtgaaccaaaaaggctagaaaccagaggaaaacctggacaacctctctcttcccatggtgcatatgcttgtttaaagtggaaatctctatagatcgtcagctcattttatctgtaattggaagaacagaaagtgctggctcactttctagttgctttcatcctccttttgttctgcattgactcatttaccagaattcattggaagaaatcaccaaagattattacaaaagaaaaatatgttgctaagattgtgttggtcgctctctgaagcagaaaagggactggaaccaattgtgcatatcagctgactttttgtttgttttagaaaagttacagtaaaaattaaaaagagataccaatggtttacactttaacaagaaattttggatatggaacaaagaattcttagacttgtattcctatttatctatattagaaatattgtatgagcaaatttgcagctgttgtgtaaatactgtatattgcaaaaatcagtattattttaagagatgtgttctcaaatgattgtttactatattacatttctggatgttctaggtgcctgtcgttgagtattgccttgtttgacattctataggttaattttcaaagcagagtattacaaaagagaagttagaattacagctactgacaatataaagggttttgttgaatcaacaatgtgatacgtaaattatagaaaaagaaaagaaacacaaaagctatagatatacagatatcagcttacctattgccttctatacttataatttaaaggattggtgtcttagtacacttgtggtcacagggatcaacgaatagtaaataatgaactcgtgcaagacaaaactgaaaccctctttccaggacctcagtaggcaccgttgaggtgtcctttgtttttgtgtgtgtgtgttcttttttaattttcgcattgttgacagatacaaacagttatactcaatgtactgtaataatcgcaaaggaaaaagttttgggataacttatttgtatgttggtagctgagaaaaatatcatcagtctagaattgatatttgagtatagtagagctttggggctttgaaggcaggttcaagaaagcatatgtcgatggttgagatatttattttccatatggttcatgttcaaatgttcacaaccacaatgcatctgactgcaataatgtgctaataatttatgtcagtagtcaccttgctcacagcaaagccagaaatgctctctccagggagtagatgtaaagtacttgtacatagaattcagaactgaagatatttattaaaagttgattttttttcttgatagtatttttatgtactaaatatttacactaatatcaattacatattttggtaaactagagagacataattagagatgcatgctttgttctgtgcatagagacctttaagcaaactactacagccaactcaaaagctaaaactgaacaaatttgatgttatgcaaacatcttgcatttttagtagttgatattaagttgatgacttgtttcccttcaaggaaacattaaattgtatggactcagctagctgttcaatgaaattgtgaattagaaacatttttaaaagtttttgaaagagataagtgcatcatgaattacatgtacatgagaggagatagtgatatcagcataatgattttgaggtcagtacctgagctgtctaaaaatatattatacaaactaaaatgtagatgaattaacctctcaaagcacagaatgtgcaagaacttttgcattttaatcgttgtaaactaacagcttaaactattgactctatacctctaaagaattgctgctactttgtgcaagaactttgaaggtcaaattaggcaaattccagatagtaaaacaatccctaagccttaagtcttttttttttcctaaaaattcccatagaataaaattctctctagtttacttgtgtgtgcatacatctcatccacaggggaagataaagatggtcacacaaacagtttccataaagatgtacatattcattatacttctgacctttgggctttcttttctactaagctaaaaattcctttttatcaaagtgtacactactgatgctgtttgttgtactgagagcacgtaccaataaaaatgttaacaaaatat

SEQ ID NO: 346 - protein, 1205 aa, Homo sapiens
MVLLSLWLIAAALVEVRTSADGQAGNEEMVQIDLPIKRYREYELVTPVSTNLEGRYLSHTLSASHKKRSARDVSSNPEQLFFNITAFGKDFHLRLKPNTQLVAPGAVVEWHETSLVPGNITDPINNHQPGSATYRIRKTEPLQTNCAYVGDIVDIPGTSVAISNCDGLAGMIKSDNEEYFIEPLERGKQMEEEKGRIHVVYKRSAVEQAPIDMSKDFHYRESDLEGLDDLGTVYGNIHQQLNETMRRRRHAGENDYNIEVLLGVDDSVVRFHGKEHVQNYLLTLMNIVNEIYHDESLGVHINVVLVRMIMLGYAKSISLIERGNPSRSLENVCRWASQQQRSDLNHSEHHDHAIFLTRQDFGPAGMQGYAPVTGMCHPVRSCTLNHEDGFSSAFVVAHETGHVLGMEHDGQGNRCGDETAMGSVMAPLVQAAFHRYHWSRCSGQELKRYIHSYDCLLDDPFDHDWPKLPELPGINYSMDEQCRFDFGVGYKMCTAFRTFDPCKQLWCSHPDNPYFCKTKKGPPLDGTECAAGKWCYKGHCMWKNANQQKQDGNWGSWTKFGSCSRTCGTGVRFRTRQCNNPMPINGGQDCPGVNFEYQLCNTEECQKHFEDFRAQQCQQRNSHFEYQNTKHHWLPYEHPDPKKRCHLYCQSKETGDVAYMKQLVHDGTHCSYKDPYSICVRGECVKVGCDKEIGSNKVEDKCGVCGGDNSHCRTVKGTFTRTPRKLGYLKMFDIPPGARHVLIQEDEASPHILAIKNQATGHYILNGKGEEAKSRTFIDLGVEWDYNIEDDIESLHTDGPLHDPVIVLIIPQENDTRSSLTYKYIIHEDSVPTINSNNVIQEELDTFEWALKSWSQCSKPCGGGFQYTKYGCRRKSDNKMVHRSFCEANKKPKPIRRMCNIQECTHPLWVAEEWEHCTKTCGSSGYQLRTVRCLQPLLDGTNRSVHSKYCMGDRPESRRPCNRVPCPAQWKTGPWSECSVTCGEGTEVRQVLCRAGDHCDGEKPESVRACQLPPCNDEPCLGDKSIFCQMEVLARYCSIPGYNKLCCESCSKRSSTLPPPYLLEAAETHDDVISNPSDLPRSLVMPTSLVPYHSETPAKKMSLSSISSVGGPNAYAAFRPNSKPDGANLRQRSAQQAGSKTVRLVTVPSSPPTKRVHLSSASQMAAASFFAASDSIGASSQARTSKKDGKIIDNRRPTRSSTLER

SEQ ID NO: 347 - DNA, 9179 bp, Homo sapiens
gcaagaactgcaggggaggaggacgctgccacccacagcctctagagctcattgcagctgggacagcccggagtgtggttagcagctcggcaagcgctgcccaggtcctggggtggtggcagccagcgggagcaggaaaggaagcatgttcccaggctgcccacgcctctgggtcctggtggtcttgggcaccagctgggtaggctgggggagccaagggacagaagcggcacagctaaggcagttctacgtggctgctcagggcatcagttggagctaccgacctgagcccacaaactcaagtttgaatctttctgtaacttcctttaagaaaattgtctacagagagtatgaaccatattttaagaaagaaaaaccacaatctaccatttcaggacttcttgggcctactttatatgctgaagtcggagacatcataaaagttcactttaaaaataaggcagataagcccttgagcatccatcctcaaggaattaggtacagtaaattatcagaaggtgcttcttaccttgaccacacattccctgcggagaagatggacgacgctgtggctccaggccgagaatacacctatgaatggagtatcagtgaggacagtggacccacccatgatgaccctccatgcctcacacacatctattactcccatgaaaatctgatcgaggatttcaactcggggctgattgggcccctgcttatctgtaaaaaagggaccctaactgagggtgggacacagaagacgtttgacaagcaaatcgtgctactatttgctgtgtttgatgaaagcaagagctggagccagtcatcatccctaatgtacacagtcaatggatatgtgaatgggacaatgccagatataacagtttgtgcccatgaccacatcagctggcatctgctgggaatgagctcggggccagaattattctccattcatttcaacggccaggtcctggagcagaaccatcataaggtctcagccatcacccttgtcagtgctacatccactaccgcaaatatgactgtgggcccagagggaaagtggatcatatcttctctcaccccaaaacatttgcaagctgggatgcaggcttacattgacattaaaaactgcccaaagaaaaccaggaatcttaagaaaataactcgtgagcagaggcggcacatgaagaggtgggaatacttcattgctgcagaggaagtcatttgggactatgcacctgtaataccagcgaatatggacaaaaaatacaggtctcagcatttggataatttctcaaaccaaattggaaaacattataagaaagttatgtacacacagtacgaagatgagtccttcaccaaacatacagtgaatcccaatatgaaagaagatgggattttgggtcctattatcagagcccaggtcagagacacactcaaaatcgtgttcaaaaatatggccagccgcccctatagcatttaccctcatggagtgaccttctcgccttatgaagatgaagtcaactcttctttcacctcaggcaggaacaacaccatgatcagagcagttcaaccaggggaaacctatacttataagtggaacatcttagagtttgatgaacccacagaaaatgatgcccagtgcttaacaagaccatactacagtgacgtggacatcatgagagacatcgcctctgggctaataggactacttctaatctgtaagagcagatccctggacaggcgaggaatacagagggcagcagacatcgaacagcaggctgtgtttgctgtgtttgatgagaacaaaagctggtaccttgaggacaacatcaacaagttttgtgaaaatcctgatgaggtgaaacgtgatgaccccaagttttatgaatcaaacatcatgagcactatcaatggctatgtgcctgagagcataactactcttggattctgctttgatgacactgtccagtggcacttctgtagtgtggggacccagaatgaaattttgaccatccacttcactgggcactcattcatctatggaaagaggcatgaggacaccttgaccctcttccccatgcgtggagaatctgtgacggtcacaatggataatgttggaacttggatgttaacttccatgaattctagtccaagaagcaaaaagctgaggctgaaattcagggatgttaaatgtatcccagatgatgatgaagactcatatgagatttttgaacctccagaatctacagtcatggctacacggaaaatgcatgatcgtttagaacctgaagatgaagagagtgatgctgactatgattaccagaacagactggctgcagcattaggaatcaggtcattccgaaactcatcattgaatcaggaagaagaagagttcaatcttactgccctagctctggagaatggcactgaattcgtttcttcaaacacagatataattgttggttcaaattattcttccccaagtaatattagtaagttcactgtcaataaccttgcagaacctcagaaagccccttctcaccaacaagccaccacagctggttccccactgagacacctcattggcaagaactcagttctcaattcttccacagcagagcattccagcccatattctgaagaccctatagaggatcctctacagccagatgtcacagggatacgtctactttcacttggtgctggagaattcaaaagtcaagaacatgctaagcataagggacccaaggtagaaagagatcaagcagcaaagcacaggttctcctggatgaaattactagcacataaagttgggagacacctaagccaagacactggttctccttccggaatgaggccctgggaggaccttcctagccaagacactggttctccttccagaatgaggccctggaaggaccctcctagtgatctgttactcttaaaacaaagtaactcatctaagattttggttgggagatggcatttggcttctgagaaaggtagctatgaaataatccaagatactgatgaagacacagctgttaacaattggctgatcagcccccagaatgcctcacgtgcttggggagaaagcacccctcttgccaacaagcctggaaagcagagtggccacccaaagtttcctagagttagacataaatctctacaagtaagacaggatggaggaaagagtagactgaagaaaagccagtttctcattaagacacgaaaaaagaaaaaagagaagcacacacaccatgctcctttatctccgaggacctttcaccctctaagaagtgaagcctacaacacattttcagaaagaagacttaagcattcgttggtgcttcataaatccaatgaaacatctcttcccacagacctcaatcagacattgccctctatggattttggctggatagcctcacttcctgaccataatcagaattcctcaaatgacactggtcaggcaagctgtcctccaggtctttatcagacagtgcccccagaggaacactatcaaacattccccattcaagaccctgatcaaatgcactctacttcagaccccagtcacagatcctcttctccagagctcagtgaaatgcttgagtatgaccgaagtcacaagtccttccccacagatataagtcaaatgtccccttcctcagaacatgaagtctggcagacagtcatctctccagacctcagccaggtgaccctctctccagaactcagccagacaaacctctctccagacctcagccacacgactctctctccagaactcattcagagaaacctttccccagccctcggtcagatgcccatttctccagacctcagccatacaaccctttctccagacctcagccatacaaccctttctttagacctcagccagacaaacctctctccagaactcagtcagacaaacctttctccagccctcggtcagatgcccctttctccagacctcagccatacaaccctttctctagacttcagccagacaaacctctctccagaactcagccatatgactctctctccagaactcagtcagacaaacctttccccagccctcggtcagatgcccatttctccagacctcagccatacaaccctttctctagacttcagccagacaaacctctctccagaactcagtcaaacaaacctttccccagccctcggtcagatgcccctttctccagaccccagccatacaaccctttctctagacctcagccagacaaacctctctccagaactcagtcagacaaacctttccccagacctcagtgagatgcccctctttgcagatctcagtcaaattccccttaccccagacctcgaccagatgacactttctccagaccttggtgagacagatctttccccaaactttggtcagatgtccctttccccagacctcagccaggtgactctctctccagacatcagtgacaccacccttctcccggatctcagccagatatcacctcctccagaccttgatcagatattctacccttctgaatctagtcagtcattgcttcttcaagaatttaatgagtcttttccttatccagaccttggtcagatgccatctccttcatctcctactctcaatgatacttttctatcaaaggaatttaatccactggttatagtgggcctcagtaaagatggtacagattacattgagatcattccaaaggaagaggtccagagcagtgaagatgactatgctgaaattgattatgtgccctatgatgacccctacaaaactgatgttaggacaaacatcaactcctccagagatcctgacaacattgcagcatggtacctccgcagcaacaatggaaacagaagaaattattacattgctgctgaagaaatatcctgggattattcagaatttgtacaaagggaaacagatattgaagactctgatgatattccagaagataccacatataagaaagtagtttttcgaaagtacctcgacagcacttttaccaaacgtgatcctcgaggggagtatgaagagcatctcggaattcttggtcctattatcagagctgaagtggatgatgttatccaagttcgttttaaaaatttagcatccagaccgtattctctacatgcccatggactttcctatgaaaaatcatcagagggaaagacttatgaagatgactctcctgaatggtttaaggaagataatgctgttcagccaaatagcagttatacctacgtatggcatgccactgagcgatcagggccagaaagtcctggctctgcctgtcgggcttgggcctactactcagctgtgaacccagaaaaagatattcactcaggcttgataggtcccctcctaatctgccaaaaaggaatactacataaggacagcaacatgcctatggacatgagagaatttgtcttactatttatgacctttgatgaaaagaagagctggtactatgaaaagaagtcccgaagttcttggagactcacatcctcagaaatgaaaaaatcccatgagtttcacgccattaatgggatgatctacagcttgcctggcctgaaaatgtatgagcaagagtgggtgaggttacacctgctgaacataggcggctcccaagacattcacgtggttcactttcacggccagaccttgctggaaaatggcaataaacagcaccagttaggggtctggccccttctgcctggttcatttaaaactcttgaaatgaaggcatcaaaacctggctggtggctcctaaacacagaggttggagaaaaccagagagcagggatgcaaacgccatttcttatcatggacagagactgtaggatgccaatgggactaagcactggtatcatatctgattcacagatcaaggcttcagagtttctgggttactgggagcccagattagcaagattaaacaatggtggatcttataatgcttggagtgtagaaaaacttgcagcagaatttgcctctaaaccttggatccaggtggacatgcaaaaggaagtcataatcacagggatccagacccaaggtgccaaacactacctgaagtcctgctataccacagagttctatgtagcttacagttccaaccagatcaactggcagatcttcaaagggaacagcacaaggaatgtgatgtattttaatggcaattcagatgcctctacaataaaagagaatcagtttgacccacctattgtggctagatatattaggatctctccaactcgagcctataacagacctacccttcgattggaactgcaaggttgtgaggtaaatggatgttccacacccctgggtatggaaaatggaaagatagaaaacaagcaaatcacagcttcttcgtttaagaaatcttggtggggagattactgggaacccttccgtgcccgtctgaatgcccagggacgtgtgaatgcctggcaagccaaggcaaacaacaataagcagtggctagaaattgatctactcaagatcaagaagataacggcaattataacacagggctgcaagtctctgtcctctgaaatgtatgtaaagagctataccatccactacagtgagcagggagtggaatggaaaccatacaggctgaaatcctccatggtggacaagatttttgaaggaaatactaataccaaaggacatgtgaagaactttttcaaccccccaatcatttccaggtttatccgtgtcattcctaaaacatggaatcaaagtattgcacttcgcctggaactctttggctgtgatatttactagaattgaacattcaaaaacccctggaagagactctttaagacctcaaaccatttagaatgggcaatgtattttacgctgtgttaaatgttaacagttttccactatttctctttcttttctattagtgaataaaattttatacaagaagcttttataatgtaactccttgctaccagtaagtaagataatggctattacttctgcattaatttgaatacaggtaggaaaatatcaagaaccaacaagaaaagggcttatctttcttaatgattgaaaatgctatgaagtaatatttatgtagttaaaatgcttcattataactcttttaaatcctttacacactagtaaaacagatattactttaaataataattgatagacctggataactttcacaaacacatgattttttaatggtttttcttgagtgaagagaaaaacaatattatcaaatgaaataagtacttaaaatatcctgtctttcccatataacaatgatttttctgactttccatgagtaaaaaaacagccaagcatctttccagtagccccattgaaattgtgaatccgtcctggtctccctaaggactgcacacattgatattcaaggttggtggtcattagatatggaacagaactgaaataaccatggtagaactgaatgtgtaatgttggctttattctagctggtactacatggcacacagtttcaaaacataatttcacctactggaaagctcagacctgtaaaacagagcatgggaactgctggtctaaatgcagttgttcctgctcaaagagacctctggccaaactggcaagcagttaaagttttctttcagggccttcctctctatggcctcaacttcctcctctctcttcttccagcaacttcccctttcatcattcctttccctggggacttggcattcagtgatcctgtagatattgcacaactggggaacctttagacatccttaaaatcacatgagatagacagtcatttggggtgtctgaaataaaccaccccaaaacttagtgttaaaagagcaaccaaaaaaaatttatgtgagattatggatttgttacttagcttgatttaatcatcctgtaacgtgtacatatatcaaaatgttatgtataccataaatatataaaattttatcaacgaaattcataacaatctctcagaccacagagaaatcaaattagaactgaggactaagaaactcactcgaaaccacacaactacatggaaactgaacaacctgctcctgaatgactactgggtaaataatgaaattaaggcagaaataaataagttccttaaaaccaatgagaacaaagagacaacataccagaatctctaggagacagggctttgcttttgctgcattctattcgttgtgaacacaaattacaggccagtctcgattcagtgtagaagggaactgcataaggaccacataccaggaggcataattcactgggagcatctttagaaactaccagagttacctgttgcccataccagtggggtaagccctatgaatgtatatgagagtttcaaacatccacaaaacattggctttctaatattcgtattcccactattcctttcttttcatgattcatgtcattgtcccatcaacatttctaagatttccattccgttaagagcaaaagagaatgttggaaggtgggggaaaacatttctttgttttctacagggccagcttcttggatgtgtgtgatctgttcagttgcaaagggtcacatgctcagaaggaccgcatgctaaatttaatgctttgcagttaccctcttgaaatcctttattttttaagaaggaattcgacatttccatttttcaatgagccccacaaattacgcagctagtcctgggcttctctactctgaaattgggcaggatctctcttgatctagaatttactaaggcataataggggcaagaaaatcttatgaaataatggggggtagggaagagatgggaatggagcatgagatccagcttcgttattctctacttgagaaaaataaggccccaaagattaaacaacttgcccaaggatattgcttgttagtgtcagaactgaaaccagaaaccaaatgatcatatccctagacttttagtctgctttctcttccataaaatgaaacttataatgtttctaatccattgctcagacaggtagacatgaatattaattgataatgactattaattgatctggaaaatacttgtttggggatcaataatatgtttgggctattatctaatgctgtgtagaaatattaaaacccctgttattttgaaataaaaaagatacccactttt

SEQ ID NO: 348 - protein, 2224 aa, Homo sapiens
MFPGCPRLWVLVVLGTSWVGWGSQGTEAAQLRQFYVAAQGISWSYRPEPTNSSLNLSVTSFKKIVYREYEPYFKKEKPQSTISGLLGPTLYAEVGDIIKVHFKNKADKPLSIHPQGIRYSKLSEGASYLDHTFPAEKMDDAVAPGREYTYEWSISEDSGPTHDDPPCLTHIYYSHENLIEDFNSGLIGPLLICKKGTLTEGGTQKTFDKQIVLLFAVFDESKSWSQSSSLMYTVNGYVNGTMPDITVCAHDHISWHLLGMSSGPELFSIHFNGQVLEQNHHKVSAITLVSATSTTANMTVGPEGKWIISSLTPKHLQAGMQAYIDIKNCPKKTRNLKKITREQRRHMKRWEYFIAAEEVIWDYAPVIPANMDKKYRSQHLDNFSNQIGKHYKKVMYTQYEDESFTKHTVNPNMKEDGILGPIIRAQVRDTLKIVFKNMASRPYSIYPHGVTFSPYEDEVNSSFTSGRNNTMIRAVQPGETYTYKWNILEFDEPTENDAQCLTRPYYSDVDIMRDIASGLIGLLLICKSRSLDRRGIQRAADIEQQAVFAVFDENKSWYLEDNINKFCENPDEVKRDDPKFYESNIMSTINGYVPESITTLGFCFDDTVQWHFCSVGTQNEILTIHFTGHSFIYGKRHEDTLTLFPMRGESVTVTMDNVGTWMLTSMNSSPRSKKLRLKFRDVKCIPDDDEDSYEIFEPPESTVMATRKMHDRLEPEDEESDADYDYQNRLAAALGIRSFRNSSLNQEEEEFNLTALALENGTEFVSSNTDIIVGSNYSSPSNISKFTVNNLAEPQKAPSHQQATTAGSPLRHLIGKNSVLNSSTAEHSSPYSEDPIEDPLQPDVTGIRLLSLGAGEFKSQEHAKHKGPKVERDQAAKHRFSWMKLLAHKVGRHLSQDTGSPSGMRPWEDLPSQDTGSPSRMRPWKDPPSDLLLLKQSNSSKILVGRWHLASEKGSYEIIQDTDEDTAVNNWLISPQNASRAWGESTPLANKPGKQSGHPKFPRVRHKSLQVRQDGGKSRLKKSQFLIKTRKKKKEKHTHHAPLSPRTFHPLRSEAYNTFSERRLKHSLVLHKSNETSLPTDLNQTLPSMDFGWIASLPDHNQNSSNDTGQASCPPGLYQTVPPEEHYQTFPIQDPDQMHSTSDPSHRSSSPELSEMLEYDRSHKSFPTDISQMSPSSEHEVWQTVISPDLSQVTLSPELSQTNLSPDLSHTTLSPELIQRNLSPALGQMPISPDLSHTTLSPDLSHTTLSLDLSQTNLSPELSQTNLSPALGQMPLSPDLSHTTLSLDFSQTNLSPELSHMTLSPELSQTNLSPALGQMPISPDLSHTTLSLDFSQTNLSPELSQTNLSPALGQMPLSPDPSHTTLSLDLSQTNLSPELSQTNLSPDLSEMPLFADLSQIPLTPDLDQMTLSPDLGETDLSPNFGQMSLSPDLSQVTLSPDISDTTLLPDLSQISPPPDLDQIFYPSESSQSLLLQEFNESFPYPDLGQMPSPSSPTLNDTFLSKEFNPLVIVGLSKDGTDYIEIIPKEEVQSSEDDYAEIDYVPYDDPYKTDVRTNINSSRDPDNIAAWYLRSNNGNRRNYYIAAEEISWDYSEFVQRETDIEDSDDIPEDTTYKKVVFRKYLDSTFTKRDPRGEYEEHLGILGPIIRAEVDDVIQVRFKNLASRPYSLHAHGLSYEKSSEGKTYEDDSPEWFKEDNAVQPNSSYTYVWHATERSGPESPGSACRAWAYYSAVNPEKDIHSGLIGPLLICQKGILHKDSNMPMDMREFVLLFMTFDEKKSWYYEKKSRSSWRLTSSEMKKSHEFHAINGMIYSLPGLKMYEQEWVRLHLLNIGGSQDIHVVHFHGQTLLENGNKQHQLGVWPLLPGSFKTLEMKASKPGWWLLNTEVGENQRAGMQTPFLIMDRDCRMPMGLSTGIISDSQIKASEFLGYWEPRLARLNNGGSYNAWSVEKLAAEFASKPWIQVDMQKEVIITGIQTQGAKHYLKSCYTTEFYVAYSSNQINWQIFKGNSTRNVMYFNGNSDASTIKENQFDPPIVARYIRISPTRAYNRPTLRLELQGCEVNGCSTPLGMENGKIENKQITASSFKKSWWGDYWEPFRARLNAQGRVNAWQAKANNNKQWLEIDLLKIKKITAIITQGCKSLSSEMYVKSYTIHYSEQGVEWKPYRLKSSMVDKIFEGNTNTKGHVKNFFNPPIISRFIRVIPKTWNQSIALRLELFGCDIY

SEQ ID NO: 349 - DNA, 2488 bp, Homo sapiens
cgctgccagcccgcccgccagccaggggctccgccgccctcgcctcggcctcgttagcccgccaggagccccgcagctcctccgggagcccgctggtaactcgcgtccctcgcgcttctccggcgcctgaggggcccgcctcgggccatggtgctctcccaggaggagccggactccgcgcggggcacgagcgaggcgcagccgctcggccccgcgcccacgggggccgctccgccgcccggcccgggaccctcggacagccccgaggcggctgtcgagaaggtggaggtggagctggcggggccggcgaccgcggagccccatgagccccccgaaccccccgagggcggctggggctggctggtgatgctggcggccatgtggtgcaacgggtcggtgttcggcatccagaacgcttgcggggtgctcttcgtgtccatgctggaaaccttcggctccaaagacgatgacaagatggtctttaagacagcatgggtaggttctctctccatggggatgattttcttttgctgcccaatagtcagcgtcttcacagacctatttggttgtcggaaaacagctgtcgtgggtgctgctgttggatttgttgggctcatgtccagttcttttgtaagttccatcgagcctctgtaccttacctatggaatcatatttgcctgcggctgctcctttgcataccagccttcattggtcattttgggacactatttcaagaagcgccttggactggtgaatggcattgtcactgctggcagcagtgtcttcacaatcctgctgcctttgctcttaagggttctgattgacagcgtgggcctcttttacacattgagggtgctctgcatcttcatgtttgttctctttctggctggctttacttaccgacctcttgctaccagtaccaaagataaagagagtggaggtagcggatcctccctcttttccaggaaaaagttcagtcctccaaaaaaaattttcaattttgccatcttcaaggtgacagcttatgcagtgtgggcagttggaataccacttgcactttttggatactttgtgccttatgttcacttgatgaaacatgtaaatgaaagatttcaagatgaaaaaaataaagaggttgttctcatgtgcattggcgtcacttcaggagttggacgactgctctttggccggattgcagattatgtgcctggtgtgaagaaggtttatctacaggtactctcctttttcttcattggtctgatgtccatgatgattcctctgtgtagcatctttggggccctcattgctgtgtgcctcatcatgggtctcttcgatggatgcttcatttccattatggctcccatagcctttgagttagttggtgcccaggatgtctcccaagcaattggatttctgctcggattcatgtctatacccatgactgttggcccacccattgcagggttacttcgtgacaaactgggctcctatgatgtggcattctacctcgctggagtccctccccttattggaggtgctgtgctttgttttatcccgtggatccatagtaagaagcaaagagagatcagtaaaaccactggaaaagaaaagatggagaaaatgttggaaaaccagaactctctgctgtcaagttcatctggaatgttcaagaaagaatctgactctattatttaatatcttacatacctccaccagactggacttgctttttgaattttaagcaagtttcctttccttttatacaaattgcaaatttcatatttttttaatcacatcctaggaatagcacaataattgggaaatagaacccttatcactagaagaaccattttctgccactaaatatctctgatgtttccatgagtctgagggcagagactctggtatatgaaaacatgtctgaaagtcacatattgtgaaaatttgaagctatctcagtaaaaagcagctttggaaactgtgaatgatctttagcttgtacaaatgtttaaaaatacctcaggctatactgaaagggttgcagtttggttaggagtggaaatattttgtttgttaatgatgtcttcagttctggtacctctgttttactttcttatgctctttggaaactttttgcaaaatttaagcctgggttctagataataccagatctacctaaacctcaagtctatgttaaagttgctttcctgctgttaaataagctatgatattaagatattctgacttgctccagtgtcaagggaccttctgggagcaggtgccaacatagtgttcagaatcaatatgtgagatgaaaaggatcccctccaggaggatcctgagctgttcagaaatcatttaagtttacagcgttgttccctttgcgtttgcagtgcgttttactcaagtagccagaaacaccccacgtttctgaatttgtttaaactgtaacaataaagtaaaatagaatgcaaaaaaaaaaaaaaaa

SEQ ID NO: 350 - protein, 515 aa, Homo sapiens
MVLSQEEPDSARGTSEAQPLGPAPTGAAPPPGPGPSDSPEAAVEKVEVELAGPATAEPHEPPEPPEGGWGWLVMLAAMWCNGSVFGIQNACGVLFVSMLETFGSKDDDKMVFKTAWVGSLSMGMIFFCCPIVSVFTDLFGCRKTAVVGAAVGFVGLMSSSFVSSIEPLYLTYGIIFACGCSFAYQPSLVILGHYFKKRLGLVNGIVTAGSSVFTILLPLLLRVLIDSVGLFYTLRVLCIFMFVLFLAGFTYRPLATSTKDKESGGSGSSLFSRKKFSPPKKIFNFAIFKVTAYAVWAVGIPLALFGYFVPYVHLMKHVNERFQDEKNKEVVLMCIGVTSGVGRLLFGRIADYVPGVKKVYLQVLSFFFIGLMSMMIPLCSIFGALIAVCLIMGLFDGCFISIMAPIAFELVGAQDVSQAIGFLLGFMSIPMTVGPPIAGLLRDKLGSYDVAFYLAGVPPLIGGAVLCFIPWIHSKKQREISKTTGKEKMEKMLENQNSLLSSSSGMFKKESDSII

SEQ ID NO: 351 - DNA, 517 bp, Homo sapiens
cctccacagcaacttccttgatccctgccacgcacgactgaacacagacagcagccgcctcgccatgaagctgctgatggtcctcatgctggcggccctcctcctgcactgctatgcagattctggctgcaaactcctggaggacatggttgaaaagaccatcaattccgacatatctatacctgaatacaaagagcttcttcaagagttcatagacagtgatgccgctgcagaggctatggggaaattcaagcagtgtttcctcaaccagtcacatagaactctgaaaaactttggactgatgatgcatacagtgtacgacagcatttggtgtaatatgaagagtaattaactttacccaaggcgtttggctcagagggctacagactatggccagaactcatctgttgattgctagaaaccacttttctttcttgtgttgtctttttatgtggaaactgctagacaactgttgaaacctcaaattcatttccatttcaataactaactgcaaatc

SEQ ID NO: 352 - protein, 95 aa, Homo sapiens
MKLLMVLMLAALLLHCYADSGCKLLEDMVEKTINSDISIPEYKELLQEFIDSDAAAEAMGKFKQCFLNQSHRTLKNFGLMMHTVYDSIWCNMKSN

SEQ ID NO: 353 - DNA, 1854 bp, Homo sapiens
gcccgctgcggtcacgctgcgcccggcgccgcagggtgggcggcgaggcactcacgagggggacgctgagggcttccgcgcgggccacccgggtcaagcgcgctccgccgggaaacttctgcgggcgccgggctgaagctccgggcagggctgggaaggaaaggaaataccaaaatatttgcagactggatccaaatcaggagcccagatgaacttaaagaagcgagcatgggattcttagtttttcaagatccgtacacacgaagcctttaatcagcatcaactccagtgtccgttttctctggttttgtgaagactgcacaaaactctcatgatggagaaccaaaggacttagttacctgtttcagtgtcatctaaagtcaactgaaaagtgaagcaggcagtaatacagccatggaaagaaattcaagtttatggaagaacctaatagatgaacacccagtctgcacaacctggaagcaagaggccgaaggagccatttatcatcttgccagtattttatttgtagtaggtttcatgggtggcagtggattcttcgggctcctttatgtcttcagtttgctggggttgggttttctctgttctgctgtctgggcttgggtagatgtctgtgcagctgacatattttcctggaattttgtactgtttgtcatctgcttcatgcaatttgttcatattgcatatcaagttcgcagcataacctttgcccgagaattccaagtgttgtacagctcccttttccagcccctggggatctctttgcctgtcttcagaacgattgctttgagctctgaagtggttactttggaaaaggaacactgttatgccatgcaggggaaaacttccattgataaactctccttgcttgtttcaggaaggatcagagtgacagttgatggcgaatttctgcattacattttcccccttcagttcctggattctcctgagtgggattcactgagacccacagaggaaggcatttttcaggtaaccctcactgcagaaactgattgtcgatatgtgtcttggaggagaaagaaattatatctgctctttgctcagcatcgctacatctcccgccttttttcagtgctaattggcagtgacattgcagataaactctatgccttgaatgacagggtatatataggaaaaagatatcactatgatattcggctacccaacttctatcaaatgtcaactccagaaatacgcagatcacccctgacacaacattttcagaattccagacgatactgtgataaatgacatcaaagtctgaaatttataagtataaaaaaagactctctcttcatcattccccagtgaaatagcaaaatacaaaaaaagagctccctaatgtttttataaatcaaattcagaagcgagatgccattgccaactgttttattcctttcaacaactgcattgtgaataaactttacaaatttttcttgtatttctcattgttataattggggagggggtggataactatgggcagtttgcccttttctgcatcaaaactgggagaatgaaattccactttctcaattcttttctcacatttactcaaatgcattgtcttgccctatggactcaggagttgcttctcaagaaacagccagcaagtattctcagcctgagggtgggttgctactgtccacataggcatttccggaattcacttttttgctacaacctccagtgaaagcaattattttaaatgtgcagttacttgatgtgactaaaaagtagaataaatgcaagagataataatatgtgaatcttgaagcctattttattgctacaaataaaataacatttaaaaag

SEQ ID NO: 354 - protein, 291 aa, Homo sapiens
MERNSSLWKNLIDEHPVCTTWKQEAEGAIYHLASILFVVGFMGGSGFFGLLYVFSLLGLGFLCSAVWAWVDVCAADIFSWNFVLFVICFMQFVHIAYQVRSITFAREFQVLYSSLFQPLGISLPVFRTIALSSEVVTLEKEHCYAMQGKTSIDKLSLLVSGRIRVTVDGEFLHYIFPLQFLDSPEWDSLRPTEEGIFQVTLTAETDCRYVSWRRKKLYLLFAQHRYISRLFSVLIGSDIADKLYALNDRVYIGKRYHYDIRLPNFYQMSTPEIRRSPLTQHFQNSRRYCDK

SEQ ID NO: 355 - DNA, 3954 bp, Homo sapiens
agggggaggtgggcagccggccagggaagcacggtccaggcggctacattcggcccggccatggcagcggcgcccctgaaagtgtgcatcgtgggctcggggaactggggttcagctgttgcaaaaataattggtaataatgtcaagaaacttcagaaatttgcctccacagtcaagatgtgggtctttgaagaaacagtgaatggcagaaaactgacagacatcataaataatgaccatgaaaatgtaaaatatcttcctggacacaagctgccagaaaatgtggttgccatgtcaaatcttagcgaggctgtgcaggatgcagacctgctggtgtttgtcattccccaccagttcattcacagaatctgtgatgagatcactgggagagtgcccaagaaagcgctgggaatcaccctcatcaagggcatagacgagggccccgaggggctgaagctcatttctgacatcatccgtgagaagatgggtattgacatcagtgtgctgatgggagccaacattgccaatgaggtggctgcagagaagttctgtgagaccaccatcggcagcaaagtaatggagaacggccttctcttcaaagaacttctgcagactccaaattttcgaattaccgtggttgatgatgcagacactgttgaactatgtggtgcgcttaagaacatcgtagctgtgggagctgggttctgcgacggcctccgctgtggagacaacaccaaagcggccgtcatccgcctgggactcatggaaatgattgcttttgccaggatcttctgcaaaggccaagtgtctacagccaccttcctagagagctgcggggtggccgacctgatcaccacctgttacggagggcggaaccgcagggtggccgaggccttcgccagaactgggaagaccattgaagagttggagaaggagatgctgaatgggcaaaagctccaaggaccgcagacttctgctgaagtgtaccgcatcctcaaacagaagggactactggacaagtttccattgtttactgcagtgtatcagatctgctacgaaagcagaccagttcaagagatgttgtcttgtcttcagagccatccagagcatacataaagtgaatcatgcaacgtgttgggggaagttctgcctttctgatcaatcttttgggttcacgtggaaaccaggacttggcaacatgatgtttgactgtaatctcatcacggatatgtatgaatttttacaggttcgtttttgaattgtgagaggcagttcattagcaaagatgtactgggcagtaactaaacacacatgcaaacatgtgaatggtggtttattcctcattctgtggatgtttctatgagccaaaatttgatgtctttttttcaaaattgcttatgaaatttccacacaatcgtagcttataagattggaacgatctcagccaaatattttaggtgtaattcatatgtatttgagtggaggattttttttctcatttttctagtgttaaattttaaccagcattaacatggtagagtggaggagtgagtgtgttcaaagatcaacatatttaacttttaaacactatctcaaagccagcataattaactactttgattgtgggctgacctttgtttttttaacaatcaggcatttttaattagataatccactcatgtatttccccctcactgcagttgtctgcatttttagcctcttttctcttcgttagttgtcagaatatgccttcgtcaaggctcagaggtaacaagacagaaaattcatctgggattttcctgctgtggctggcacattcttctgattaacagacacttgtatgatgctttaggctagttagtgcattttttagcaaacatttatcttaaacatcacagatccactggggggtgcaaggggctactgttagtcctcttgttagatgcagtcactcctcctggtcacctagtgagcagggacagagccaggagtcaagtgcagtgccaaggtgcatgaccctctgagaagtcactgggctgatttgacctccgactcattggttgtgcaaatgccatgtgcagcctttcctgaggccataggagggcttcctgcagctgagatctatgcaggccatcctctcaacaagtgccactccaagggcggtcctcggtgcagcagcatcagcttcacttgtgggggggtgggggaaggggcggtctcagaaatgcaggttcccaggtcccaccctggacttctgaaggggtgtggcatctgtgtttctgatgcttactacaatatgtgaaccactactttagaaaatctgctttaacttggtattcctctaattgtgttccctaggaaatgactgtcccaagagccagtgattattccaggtgttccctggaaaggtcaagtgagtctgggaaacactatgtctgtacacctcttgaaggtgtcgaatgtatgtttatacatcagtggaacccatttttctagcctagcaagtcccaaacacattacactgaagagattttggtgaggaaacttgctggagttttcagggaacactgttctaggcttaggtgaccttaggatcactcaagtagacgcttcactccctgcgagaaattaggatgaataactacctgtggcattgttggttctgaacttttacagttcaggcctgctgtgaatctttgatgaagctttaaggtgacactgttgtacaagatgtcagctttgctgaaacgcacattacctggaataagtgctttaattgtagaattagaatgggatttactgtactgttttaaatgagattggcttcagaatccattacagttaccttacatagcacttgatacgtgttaaatgaacatatgaatgtaatttatatattcctagaatttaagttactttgtgagatttgggcctgtccctcaatgccagtttaggatttctttttttctataccttgaaatgattataaaatagattttcatgggaattttaaaaactctatccaaaacatttttggagcattttaaagccccatacacagaagtatacgaaagcacacaaaacactccaagtttcagcagttttagcgccaccattaacccactttgcttgtctcatgaaaaatctttgttaaagtttgtacacaggtaacaaaaagttactttaaaagatatataaagggctgtaagctaattgtggtgtctagtaagtagcataatgagatgtgaggagttggaactttgcgtgttttgcgtattttcatctgcattcagcttcttactctgggtttgtactcgagtgttatttctttacaaatgcccttgtaattaccactctgaagtctgctgactgtgtctcttgaacatacttaggatattctgcacattatggaaaaaggtaaattttagaagtttctgctctactaactgtagatatttatgactctgcgagttatctatttttataaccacctgtggtccattgttcattttaattcacatttcttatgaagtatggtaacagggagggagacacctagattagcagctcaatttgtactacttcagccaatctgtgaatgtaaaaactacactgttgccttgctaggatccaccctcctataatatggaacaaatatctgaatgaaatccaccctaggagacggagtcaaactaaacttgtggtttttcatttaacttttgactacagcatggccccatggcatccacaccaagagggtgttgtgatgaggtgccggtgtgcaaagggaactttagtttttccactggttcttatctgctagccttttacatacatgtgtactatatttgtttatagactgtaggtggatatataatttaaaagcttgatttaataaacatttaaccccataaaaaaaaaaaaaaaaaaaaaaaaagaaaaaaaaaaaaaaaa

SEQ ID NO: 356 - protein, 351 aa, Homo sapiens
MAAAPLKVCIVGSGNWGSAVAKIIGNNVKKLQKFASTVKMWVFEETVNGRKLTDIINNDHENVKYLPGHKLPENVVAMSNLSEAVQDADLLVFVIPHQFIHRICDEITGRVPKKALGITLIKGIDEGPEGLKLISDIIREKMGIDISVLMGANIANEVAAEKFCETTIGSKVMENGLLFKELLQTPNFRITVVDDADTVELCGALKNIVAVGAGFCDGLRCGDNTKAAVIRLGLMEMIAFARIFCKGQVSTATFLESCGVADLITTCYGGRNRRVAEAFARTGKTIEELEKEMLNGQKLQGPQTSAEVYRILKQKGLLDKFPLFTAVYQICYESRPVQEMLSCLQSHPEHT

SEQ ID NO: 357 - DNA, 23 bp, Homo sapiens
ccaagggagtggccctatcaaat

SEQ ID NO: 358 - DNA, 28 bp, Homo sapiens
ccatagaggtgccaggagcacggatcct

SEQ ID NO: 359 - DNA, 25 bp, Homo sapiens
ggatggtcagcattcaattcatcct

SEQ ID NO: 360 - DNA, 19 bp, Homo sapiens
cgcaagctgctggagggtg

SEQ ID NO: 361 - DNA, 25 bp, Homo sapiens
ggagtgcaggctgaatggcgaaggc

SEQ ID NO: 362 - DNA, 21 bp, Homo sapiens
ctggagacggtggactgcacc

SEQ ID NO: 363 - DNA, 24 bp, Homo sapiens
tcccatttctttcagccagatcct

SEQ ID NO: 364 - DNA, 30 bp, Homo sapiens
cccagggaatcactacaggctggttagcca

SEQ ID NO: 365 - DNA, 25 bp, Homo sapiens
aaggtaacattggacatgctgcctt

SEQ ID NO: 366 - DNA, 25 bp, Homo sapiens
accatggtagaagttggagcaccat

SEQ ID NO: 367 - DNA, 30 bp, Homo sapiens
tgttctcctgcctactggaagccaagcact

SEQ ID NO: 368 - DNA, 25 bp, Homo sapiens
atttgaaaacccacttctccaccaa

SEQ ID NO: 369 - DNA, 24 bp, Homo sapiens
catgatgtgcagttctctggagca

SEQ ID NO: 370 - DNA, 29 bp, Homo sapiens
gctggctgtgctggtcactaccttccaca

SEQ ID NO: 371 - DNA, 22 bp, Homo sapiens
tcgccctcttggcaggagtact

SEQ ID NO: 372 - DNA, 24 bp, Homo sapiens
cagctgcgtgagtaccaggaactc

SEQ ID NO: 373 - DNA, 24 bp, Homo sapiens
gcgtgaagctggccctggacatcg

SEQ ID NO: 374 - DNA, 20 bp, Homo sapiens
agcagcttgcggtaggtggc

SEQ ID NO: 375 - DNA, 20 bp, Homo sapiens
ttgctgagccctttgctccc

SEQ ID NO: 376 - DNA, 30 bp, Homo sapiens
cgactgcctggacagtcagcaaggaattgt

SEQ ID NO: 377 - DNA, 20 bp, Homo sapiens
agccagagttggcagccagg

SEQ ID NO: 378 - DNA, 18 bp, Homo sapiens
gtgaggaacacgccggcc

SEQ ID NO: 379 - DNA, 30 bp, Homo sapiens
tgcatcgagccttgaagggtattggaactg

SEQ ID NO: 380 - DNA, 25 bp, Homo sapiens
tctggacaccattattcggttcaga

SEQ ID NO: 381 - DNA, 22 bp, Homo sapiens
agaggcagctgtcacgggagtt

SEQ ID NO: 382 - DNA, 29 bp, Homo sapiens
ggccgtgttccattcaatggacaagatcc

SEQ ID NO: 383 - DNA, 23 bp, Homo sapiens
ctggacctttgactggctcttgc

SEQ ID NO: 384 - DNA, 23 bp, Homo sapiens
ttgtgtttgggtgatcatggctg

SEQ ID NO: 385 - DNA, 30 bp, Homo sapiens
gccaaacatcatcctgacaaatggtcagcc

SEQ ID NO: 386 - DNA, 24 bp, Homo sapiens
agctgttcacataggtgactgccg

SEQ ID NO: 387 - DNA, 22 bp, Homo sapiens
tcctctggatatggcagtggca

SEQ ID NO: 388 - DNA, 23 bp, Homo sapiens
tatggcggtggcctcggtggagg

SEQ ID NO: 389 - DNA, 15 bp, Homo sapiens
ccaccgaggccgccg

SEQ ID NO: 390 - DNA, 24 bp, Homo sapiens
gagcacctggaagcagtaacatgc

SEQ ID NO: 391 - DNA, 30 bp, Homo sapiens
agcaagaatatttcggtgaacggtgtgggg

SEQ ID NO: 392 - DNA, 22 bp, Homo sapiens
ggcagctatggctgctaatgca

SEQ ID NO: 393 - DNA, 22 bp, Homo sapiens
atggaggacgccttcaacaagg

SEQ ID NO: 394 - DNA, 28 bp, Homo sapiens
tgttccaccaagccatggtggatgtgaa

SEQ ID NO: 395 - DNA, 21 bp, Homo sapiens
gctgcttcagtgccctcctca

SEQ ID NO: 396 - DNA, 20 bp, Homo sapiens
caccgactgtgactccggca

SEQ ID NO: 397 - DNA, 22 bp, Homo sapiens
acggtggcgacagcggctctgg

SEQ ID NO: 398 - DNA, 15 bp, Homo sapiens
cgtcgggctgggcgg

SEQ ID NO: 399 - DNA, 15 bp, Homo sapiens
caggcggccgtggcc

SEQ ID NO: 400 - DNA, 28 bp, Homo sapiens
gagacacgcacatcatcaaggcgcagag

SEQ ID NO: 401 - DNA, 21 bp, Homo sapiens
ggtcttgcggcagtctgtgct

SEQ ID NO: 402 - DNA, 23 bp, Homo sapiens
tgtcattgaccctgtgagaggca

SEQ ID NO: 403 - DNA, 30 bp, Homo sapiens
ttcgtgttcctccagaaattgctctgcagc

SEQ ID NO: 404 - DNA, 23 bp, Homo sapiens
cttgtgttgctggatggctcatg

SEQ ID NO: 405 - DNA, 19 bp, Homo sapiens
tggatctgcagccatgccc

SEQ ID NO: 406 - DNA, 28 bp, Homo sapiens
agttcctgacggtgttcctggccattcc

SEQ ID NO: 407 - DNA, 23 bp, Homo sapiens
tccagatgtgcagacagctgagg

SEQ ID NO: 408 - DNA, 16 bp, Homo sapiens
ttgccagcccggcgag

SEQ ID NO: 409 - DNA, 30 bp, Homo sapiens
gagttacctcgtccgagtggtgagcaccaa

SEQ ID NO: 410 - DNA, 25 bp, Homo sapiens
cttgaagaacaccatagcatgctgg

SEQ ID NO: 411 - DNA, 15 bp, Homo sapiens
cgagtcccgccgccg

SEQ ID NO: 412 - DNA, 22 bp, Homo sapiens
acggcgacaggctcacgctggc

SEQ ID NO: 413 - DNA, 18 bp, Homo sapiens
gcgcacaccgtgtcgacg

SEQ ID NO: 414 - DNA, 25 bp, Homo sapiens
tagggtggaaatggatacacgaacc

SEQ ID NO: 415 - DNA, 29 bp, Homo sapiens
acaatgccaacttctgtgctggagcatgc

SEQ ID NO: 416 - DNA, 23 bp, Homo sapiens
ccctgctgtgctgagtgtctgaa

SEQ ID NO: 417 - DNA, 24 bp, Homo sapiens
ggacagcatcaagagtgagaccca

SEQ ID NO: 418 - DNA, 27 bp, Homo sapiens
cactggaggaggccatgctcactgtgg

SEQ ID NO: 419 - DNA, 20 bp, Homo sapiens
gcgtccctgctcccttcatg

SEQ ID NO: 420 - DNA, 25 bp, Homo sapiens
ttcggagaaaggcattagatctgga

SEQ ID NO: 421 - DNA, 28 bp, Homo sapiens
tgaagccctggagtactatgagcgggcc

SEQ ID NO: 422 - DNA, 25 bp, Homo sapiens
ttctcaaagtcagcagccagtctca

SEQ ID NO: 423 - DNA, 21 bp, Homo sapiens
tccaagccctctcccaacaca

SEQ ID NO: 424 - DNA, 27 bp, Homo sapiens
aaccaccccgtccgatttgggtctgat

SEQ ID NO: 425 - DNA, 25 bp, Homo sapiens
gctgctctttgtacgtctccacctt

SEQ ID NO: 426 - DNA, 25 bp, Homo sapiens
aagcaacagtttctcattcttcgcc

SEQ ID NO: 427 - DNA, 30 bp, Homo sapiens
tcatgcatccaacgtcaagtacaccatgca

SEQ ID NO: 428 - DNA, 25 bp, Homo sapiens
catcaaagcctcctgcttctcactt

SEQ ID NO: 429 - DNA, 25 bp, Homo sapiens
agaagatgaggatggctgtcattgg

SEQ ID NO: 430 - DNA, 30 bp, Homo sapiens
gggtgcgatatttcttcttgcaggtctggc

SEQ ID NO: 431 - DNA, 21 bp, Homo sapiens
tgccataccatgctgtggcaa

SEQ ID NO: 432 - DNA, 22 bp, Homo sapiens
ccctggccaggattgctacagt

SEQ ID NO: 433 - DNA, 25 bp, Homo sapiens
ctcagtgccatgggcttcactgcgg

SEQ ID NO: 434 - DNA, 19 bp, Homo sapiens
gaggacgaggcgattcccg

SEQ ID NO: 435 - DNA, 22 bp, Homo sapiens
ggaacacaaagcccaggaagga

SEQ ID NO: 436 - DNA, 30 bp, Homo sapiens
agggagcacatcaaaggcaaagagaccacc

SEQ ID NO: 437 - DNA, 18 bp, Homo sapiens
cgggagctttggtggcca

SEQ ID NO: 438 - DNA, 22 bp, Homo sapiens
gctggtgcgaaaagatctgcaa

SEQ ID NO: 439 - DNA, 30 bp, Homo sapiens
aaatgcagacaagcagctgagcttcgagga

SEQ ID NO: 440 - DNA, 22 bp, Homo sapiens
cctcgccatcagcatgatgaac

SEQ ID NO: 441 - DNA, 24 bp, Homo sapiens
acttctcaaagccgggtcatgaat

SEQ ID NO: 442 - DNA, 30 bp, Homo sapiens
tgcttcagatttggaactggaccccatgaa

SEQ ID NO: 443 - DNA, 20 bp, Homo sapiens
ccgcagcatctgcctcagtg

SEQ ID NO: 444 - DNA, 25 bp, Homo sapiens
taaatacccaggtgttgggatccag

SEQ ID NO: 445 - DNA, 25 bp, Homo sapiens
ttgcgcatcttccatttggcgttgg

SEQ ID NO: 446 - DNA, 20 bp, Homo sapiens
tcggcgaccaatgcacattc

SEQ ID NO: 447 - DNA, 24 bp, Homo sapiens
ctgtaagtgcaatgcttgtgctcg

SEQ ID NO: 448 - DNA, 30 bp, Homo sapiens
atcgtggacctggagatgctgacagtcagc

SEQ ID NO: 449 - DNA, 25 bp, Homo sapiens
tcttaacacagagcttgtgcggaag

SEQ ID NO: 450 - DNA, 21 bp, Homo sapiens
atccacagcgagacctccgtg

SEQ ID NO: 451 - DNA, 27 bp, Homo sapiens
ccgaccatgtcgtctggtccctgttca

SEQ ID NO: 452 - DNA, 23 bp, Homo sapiens
atgaagcccagacagcaccagtt

SEQ ID NO: 453 - DNA, 21 bp, Homo sapiens
cctgcatctgatggaccagcc

SEQ ID NO: 454 - DNA, 30 bp, Homo sapiens
cttactggagcagaagctttcccgagccaa

SEQ ID NO: 455 - DNA, 21 bp, Homo sapiens
ccagctctgacatcatgggcc

SEQ ID NO: 456 - DNA, 20 bp, Homo sapiens
gctccccacaggcattgagg

SEQ ID NO: 457 - DNA, 26 bp, Homo sapiens
ggtaggctcctggagcaggtgggcac

SEQ ID NO: 458 - DNA, 18 bp, Homo sapiens
tggctggcccacaaagcc

SEQ ID NO: 459 - DNA, 21 bp, Homo sapiens
gggcatctgtgctgaacggac

SEQ ID NO: 460 - DNA, 29 bp, Homo sapiens
cgctatccagaaggccgtctcagaagggt

SEQ ID NO: 461 - DNA, 25 bp, Homo sapiens
gatagcaattgccctgaaatccttg

SEQ ID NO: 462 - DNA, 25 bp, Homo sapiens
aacaaagggcaagagtgctgacttc

SEQ ID NO: 463 - DNA, 29 bp, Homo sapiens
cttcgatcctcgtggcctccttcctgaat

SEQ ID NO: 464 - DNA, 23 bp, Homo sapiens
tggtcagtgagcctgggtaggtc

SEQ ID NO: 465 - DNA, 24 bp, Homo sapiens
agcctgtgaggtccaagctagagg

SEQ ID NO: 466 - DNA, 30 bp, Homo sapiens
cctctgagtgggagctggaccctgtaaagg

SEQ ID NO: 467 - DNA, 24 bp, Homo sapiens
cccatagcattcgtctcagagcag

SEQ ID NO: 468 - DNA, 25 bp, Homo sapiens
atggacgactgaccacaatcaactg

SEQ ID NO: 469 - DNA, 30 bp, Homo sapiens
ctgaaactcacctgctttgaattggcaccg

SEQ ID NO: 470 - DNA, 24 bp, Homo sapiens
cagatctcaactccccggtattcc

SEQ ID NO: 471 - DNA, 20 bp, Homo sapiens
tccagtccagctcggcaaca

SEQ ID NO: 472 - DNA, 28 bp, Homo sapiens
acctgatggcctatcaccaggaggccag

SEQ ID NO: 473 - DNA, 21 bp, Homo sapiens
gatgtggctggagatgcgctt

SEQ ID NO: 474 - DNA, 18 bp, Homo sapiens
tgggcgccctgaagatgc

SEQ ID NO: 475 - DNA, 27 bp, Homo sapiens
ttgtgtttgcaagatctgcggcaaggc

SEQ ID NO: 476 - DNA, 23 bp, Homo sapiens
cttgaagcaaccagggtctggaa

SEQ ID NO: 477 - DNA, 21 bp, Homo sapiens
ggaaggccagcttcaccacct

SEQ ID NO: 478 - DNA, 25 bp, Homo sapiens
ccgcttgctgtctgccctctttggc

SEQ ID NO: 479 - DNA, 22 bp, Homo sapiens
acaactgcccagatgtgcagga

SEQ ID NO: 480 - DNA, 16 bp, Homo sapiens
cctgcgggtggcgctg

SEQ ID NO: 481 - DNA, 22 bp, Homo sapiens
tgctcctgctcctggtggccgc

SEQ ID NO: 482 - DNA, 20 bp, Homo sapiens
gcactggcagcgcagttcag

SEQ ID NO: 483 - DNA, 16 bp, Homo sapiens
cgccctgcccgtgcac

SEQ ID NO: 484 - DNA, 18 bp, Homo sapiens
cgcagccgccctccgcca

SEQ ID NO: 485 - DNA, 17 bp, Homo sapiens
cgcggtcatcggcgatg

SEQ ID NO: 486 - DNA, 23 bp, Homo sapiens
agggaagatgtgcctgtcctgtg

SEQ ID NO: 487 - DNA, 30 bp, Homo sapiens
ctggtgatgagaccagactccagctggagg

SEQ ID NO: 488 - DNA, 21 bp, Homo sapiens
tctgagcggatgaaggcgaag

SEQ ID NO: 489 - DNA, 25 bp, Homo sapiens
tcacaaaggaaaaattgaccagtgc

SEQ ID NO: 490 - DNA, 29 bp, Homo sapiens
tggcagagtggagatgtgtggaaggagga

SEQ ID NO: 491 - DNA, 24 bp, Homo sapiens
agctcgaccttgtaaacgaagcaa

SEQ ID NO: 492 - DNA, 24 bp, Homo sapiens
ctagtgctgacctacgggctgatg

SEQ ID NO: 493 - DNA, 26 bp, Homo sapiens
ggccaaggaccgcagtgaggaggaac

SEQ ID NO: 494 - DNA, 22 bp, Homo sapiens
ggtgcttctgcacacgctcatt

SEQ ID NO: 495 - DNA, 23 bp, Homo sapiens
ggtgaccaaggctttccagatga

SEQ ID NO: 496 - DNA, 30 bp, Homo sapiens
tcagcttaagaaaggcagccaagtggaggc

SEQ ID NO: 497 - DNA, 24 bp, Homo sapiens
tcctgaaactccaggtcctctggt

SEQ ID NO: 498 - DNA, 25 bp, Homo sapiens
atttaccaaggaatcaaacatgcgg

SEQ ID NO: 499 - DNA, 30 bp, Homo sapiens
ccttcaagtgcgtgagtgaacagagcctcc

SEQ ID NO: 500 - DNA, 20 bp, Homo sapiens
cacctgcaggtgggctgaca

SEQ ID NO: 501 - DNA, 25 bp, Homo sapiens
cacgcttcaatgagaacaacaggag

SEQ ID NO: 502 - DNA, 30 bp, Homo sapiens
tcggttttcccatttgaaagtgggaaacca

SEQ ID NO: 503 - DNA, 24 bp, Homo sapiens
ccttgaagtggtcaggttcaacca

SEQ ID NO: 504 - DNA, 22 bp, Homo sapiens
caacgcagaggatgctcaggaa

SEQ ID NO: 505 - DNA, 30 bp, Homo sapiens
ttcagtgatgtggagagggccattgagacc

SEQ ID NO: 506 - DNA, 20 bp, Homo sapiens
gctgctgggtgaccaggtcc

SEQ ID NO: 507 - DNA, 19 bp, Homo sapiens
tctgggattgcttcggggg

SEQ ID NO: 508 - DNA, 29 bp, Homo sapiens
aggtcactgaggagggcaccgaggctact

SEQ ID NO: 509 - DNA, 22 bp, Homo sapiens
gcgtggactgagggagttgctt

SEQ ID NO: 510 - DNA, 22 bp, Homo sapiens
gctgcgggaagatttggagaac

SEQ ID NO: 511 - DNA, 25 bp, Homo sapiens
gaaggccttgcctcctgcccaggag

SEQ ID NO: 512 - DNA, 25 bp, Homo sapiens
tccaccctcatccatgttgacatag

SEQ ID NO: 513 - DNA, 20 bp, Homo sapiens
ggtgcgaggatgcttacccg

SEQ ID NO: 514 - DNA, 29 bp, Homo sapiens
cagatagatgacaccatgttctgcgccgg

SEQ ID NO: 515 - DNA, 24 bp, Homo sapiens
cctggcaggagtctctacctgctt

SEQ ID NO: 516 - DNA, 19 bp, Homo sapiens
caccgcctgcaggaagcag

SEQ ID NO: 517 - DNA, 24 bp, Homo sapiens
gcagcgcttcacagctcgcgatga

SEQ ID NO: 518 - DNA, 25 bp, Homo sapiens
acaagtcacagaagcagttcaggca

SEQ ID NO: 519 - DNA, 17 bp, Homo sapiens
cggctgccgcaaggtca

SEQ ID NO: 520 - DNA, 21 bp, Homo sapiens
ggcaccctggacgccaaccgc

SEQ ID NO: 521 - DNA, 25 bp, Homo sapiens
aactccagctggaagacgtcatagc

SEQ ID NO: 522 - DNA, 23 bp, Homo sapiens
aagcagctcacggaactggagaa

SEQ ID NO: 523 - DNA, 18 bp, Homo sapiens
gcgcgcccgcagggtgga

SEQ ID NO: 524 - DNA, 19 bp, Homo sapiens
gagctgcagggatgcagcg

SEQ ID NO: 525 - DNA, 20 bp, Homo sapiens
tggaggcagctggcacaaga

SEQ ID NO: 526 - DNA, 28 bp, Homo sapiens
gctgaggcctggctgaattacccatgct

SEQ ID NO: 527 - DNA, 22 bp, Homo sapiens
gaatccaggagctcactgggga

SEQ ID NO: 528 - DNA, 20 bp, Homo sapiens
cccgggcgggaataagtacc

SEQ ID NO: 529 - DNA, 27 bp, Homo sapiens
aactaccagccgtacccgtgcgcagag

SEQ ID NO: 530 - DNA, 22 bp, Homo sapiens
agcgcagtactcatcagtgccg

SEQ ID NO: 531 - DNA, 20 bp, Homo sapiens
tatgggcttctgcgcaccaa

SEQ ID NO: 532 - DNA, 29 bp, Homo sapiens
gagggactgtgctctgccaatgtgactcg

SEQ ID NO: 533 - DNA, 25 bp, Homo sapiens
tccacagccagtataggtgaaagca

SEQ ID NO: 534 - DNA, 23 bp, Homo sapiens
aaggacatcggctggaatgactg

SEQ ID NO: 535 - DNA, 30 bp, Homo sapiens
ctggctatcatgccaactactgcgagggtg

SEQ ID NO: 536 - DNA, 21 bp, Homo sapiens
ccggacgtgcctgctatatgg

SEQ ID NO: 537 - DNA, 22 bp, Homo sapiens
ctcatcgcctggtgtttgttgg

SEQ ID NO: 538 - DNA, 27 bp, Homo sapiens
cctctgagagcacaggtcagggctgca

SEQ ID NO: 539 - DNA, 20 bp, Homo sapiens
gcctggcccagtgctgtacc

SEQ ID NO: 540 - DNA, 17 bp, Homo sapiens
aagcgcagccgcagggt

SEQ ID NO: 541 - DNA, 25 bp, Homo sapiens
tctctaccctcgagtggtccggcgc

SEQ ID NO: 542 - DNA, 20 bp, Homo sapiens
cggttcctcgactggcagct

SEQ ID NO: 543 - DNA, 20 bp, Homo sapiens
gggagtgtcagcagccccac

SEQ ID NO: 544 - DNA, 30 bp, Homo sapiens
gtgtgctgctgacccacagtggaaaacaga

SEQ ID NO: 545 - DNA, 18 bp, Homo sapiens
tcatgcggccttggaggg

SEQ ID NO: 546 - DNA, 25 bp, Homo sapiens
gggagaagactcctacaacccgaat

SEQ ID NO: 547 - DNA, 26 bp, Homo sapiens
caccctaaagccgaaatgcgcccatc

SEQ ID NO: 548 - DNA, 21 bp, Homo sapiens
cgctgatatccgggacaccag

SEQ ID NO: 549 - DNA, 24 bp, Homo sapiens
tatgctgagttgaaggaccggttg

SEQ ID NO: 550 - DNA, 28 bp, Homo sapiens
ggtcagagttccatgctgggtgagcagg

SEQ ID NO: 551 - DNA, 24 bp, Homo sapiens
tctgtcttcacactctggatccgg

SEQ ID NO: 552 - DNA, 25 bp, Homo sapiens
attgagcagaccatcaagtcaggct

SEQ ID NO: 553 - DNA, 25 bp, Homo sapiens
gcaggttggacagcagcgcacgttc

SEQ ID NO: 554 - DNA, 23 bp, Homo sapiens
gcttcagggcttctctgcacttg

SEQ ID NO: 555 - DNA, 16 bp, Homo sapiens
aggcccaggccgccac

SEQ ID NO: 556 - DNA, 29 bp, Homo sapiens
ctgcaaccacactgtgatggccctaatgg

SEQ ID NO: 557 - DNA, 25 bp, Homo sapiens
atctctccctcaagctcctccactt

SEQ ID NO: 558 - DNA, 23 bp, Homo sapiens
aggaggacaagccagcatgtgtc

SEQ ID NO: 559 - DNA, 22 bp, Homo sapiens
catgcggacctcctggccgtgg

SEQ ID NO: 560 - DNA, 19 bp, Homo sapiens
aggcggtgatggcctgctt

SEQ ID NO: 561 - DNA, 19 bp, Homo sapiens
ctgcagggaatgcttcgcg

SEQ ID NO: 562 - DNA, 25 bp, Homo sapiens
gcgagaaccacttccacgcacgacg

SEQ ID NO: 563 - DNA, 17 bp, Homo sapiens
ggccacacgtggcgcac

SEQ ID NO: 564 - DNA, 21 bp, Homo sapiens
ttcccagctgggagcacagag

SEQ ID NO: 565 - DNA, 30 bp, Homo sapiens
tccaatcagatcaccctcgtggaagacgtc

SEQ ID NO: 566 - DNA, 17 bp, Homo sapiens
tggccaggaggtcggcc

SEQ ID NO: 567 - DNA, 18 bp, Homo sapiens
ggaggccgacgagaggcc

SEQ ID NO: 568 - DNA, 28 bp, Homo sapiens
tggttcaccaacccatgcaagaccatga

SEQ ID NO: 569 - DNA, 19 bp, Homo sapiens
cggcgccacacgatgaact

SEQ ID NO: 570 - DNA, 24 bp, Homo sapiens
aaggagattgctgcaaagcacaaa

SEQ ID NO: 571 - DNA, 30 bp, Homo sapiens
gcagcccaggttctgatccgtttccatatc

SEQ ID NO: 572 - DNA, 25 bp, Homo sapiens
acctgaatgttctcaacaatgcgtg

SEQ ID NO: 573 - DNA, 23 bp, Homo sapiens
agtctccctaatggcaaaccggt

SEQ ID NO: 574 - DNA, 30 bp, Homo sapiens
tgtgctcatgaacaatggcctcaagatgga

SEQ ID NO: 575 - DNA, 21 bp, Homo sapiens
acgaaaccgtgctccttgcag

SEQ ID NO: 576 - DNA, 22 bp, Homo sapiens
ccacctcccacctggctaccta

SEQ ID NO: 577 - DNA, 28 bp, Homo sapiens
tttccagggccctaagcaggatgctgag

SEQ ID NO: 578 - DNA, 24 bp, Homo sapiens
atgtccaggatgaacctcttggct

SEQ ID NO: 579 - DNA, 20 bp, Homo sapiens
gttccaaggtgcgggagcac

SEQ ID NO: 580 - DNA, 28 bp, Homo sapiens
attcccagcttctggctcaaccaccagg

SEQ ID NO: 581 - DNA, 21 bp, Homo sapiens
ggtcgtggtcccagcactcag

SEQ ID NO: 582 - DNA, 24 bp, Homo sapiens
tgctggccattgccatatttattc

SEQ ID NO: 583 - DNA, 30 bp, Homo sapiens
caagggcctttggagcagattctgaacaca

SEQ ID NO: 584 - DNA, 25 bp, Homo sapiens
aagcctccacttccctttcctctaa

SEQ ID NO: 585 - DNA, 19 bp, Homo sapiens
gcagtcgcaactgtggggc

SEQ ID NO: 586 - DNA, 29 bp, Homo sapiens
ctatggatgcaggccattcgtccttccag

SEQ ID NO: 587 - DNA, 24 bp, Homo sapiens
caccagaacaccatgatccaggtt

SEQ ID NO: 588 - DNA, 19 bp, Homo sapiens
aacggcatgtccgtggcag

SEQ ID NO: 589 - DNA, 18 bp, Homo sapiens
gccgcgcctggccagcca

SEQ ID NO: 590 - DNA, 17 bp, Homo sapiens
cgccagtcggcctgggt

SEQ ID NO: 591 - DNA, 16 bp, Homo sapiens
ttcgggccagagcgcg

SEQ ID NO: 592 - DNA, 30 bp, Homo sapiens
ccatagagtcccaggatggaggacccttcc

SEQ ID NO: 593 - DNA, 19 bp, Homo sapiens
agcgggtgctggaagagcc

SEQ ID NO: 594 - DNA, 17 bp, Homo sapiens
cgcagccgcagctccag

SEQ ID NO: 595 - DNA, 22 bp, Homo sapiens
cccagcctcagcctcagccgca

SEQ ID NO: 596 - DNA, 20 bp, Homo sapiens
gatgcggatacgggtggagc

SEQ ID NO: 597 - DNA, 19 bp, Homo sapiens
cggctccgggttctggaag

SEQ ID NO: 598 - DNA, 21 bp, Homo sapiens
actcgcagtcgccgggctgcc

SEQ ID NO: 599 - DNA, 16 bp, Homo sapiens
gttggccgcgatgccg

SEQ ID NO: 600 - DNA, 25 bp, Homo sapiens
tgcaccaacgaactgtacatgatga

SEQ ID NO: 601 - DNA, 25 bp, Homo sapiens
ttggcatgcagtgccctcccagaga

SEQ ID NO: 602 - DNA, 25 bp, Homo sapiens
tggctgaggtccaagtattcctcat

SEQ ID NO: 603 - DNA, 19 bp, Homo sapiens
tccaccctgacacaggccg

SEQ ID NO: 604 - DNA, 21 bp, Homo sapiens
cggaggaagcccaccgtgccg

SEQ ID NO: 605 - DNA, 25 bp, Homo sapiens
ctggcttctgagtttcacgaacatg

SEQ ID NO: 606 - DNA, 23 bp, Homo sapiens
ggtggatgatcaaaccttgccac

SEQ ID NO: 607 - DNA, 26 bp, Homo sapiens
ctctccggccaggaagttcactgggc

SEQ ID NO: 608 - DNA, 23 bp, Homo sapiens
tcagatgcaagcagcaactttgg

SEQ ID NO: 609 - DNA, 21 bp, Homo sapiens
aaagttccgaaatggaggcgg

SEQ ID NO: 610 - DNA, 29 bp, Homo sapiens
gaggtggaccgcgtggactatgacagaca

SEQ ID NO: 611 - DNA, 25 bp, Homo sapiens
atctccacaaacgtgatgactgcac

SEQ ID NO: 612 - DNA, 25 bp, Homo sapiens
gtgcagctgttgtggagatgttgat

SEQ ID NO: 613 - DNA, 30 bp, Homo sapiens
gtgtggttggcaaaatttccaagcactgga

SEQ ID NO: 614 - DNA, 25 bp, Homo sapiens
tcagcgtctgtaaatgcctctctca

SEQ ID NO: 615 - DNA, 25 bp, Homo sapiens
cttccaggtgaatccaacaagatcc

SEQ ID NO: 616 - DNA, 29 bp, Homo sapiens
ggactactctggatcaggcttcggctccg

SEQ ID NO: 617 - DNA, 20 bp, Homo sapiens
tcctgatccagagccggagc

SEQ ID NO: 618 - DNA, 23 bp, Homo sapiens
aatgaggaatcgggtcctcttgg

SEQ ID NO: 619 - DNA, 28 bp, Homo sapiens
caacagtgctgacctggactgtgacccg

SEQ ID NO: 620 - DNA, 24 bp, Homo sapiens
acataagaggtttgcagggatggg

SEQ ID NO: 621 - DNA, 24 bp, Homo sapiens
ggaatgccattacactgtgcttgg

SEQ ID NO: 622 - DNA, 30 bp, Homo sapiens
tgctttgtgagtagaccacatcccaagcca

SEQ ID NO: 623 - DNA, 22 bp, Homo sapiens
gtcatggctgcagttctgtcgg

SEQ ID NO: 624 - DNA, 23 bp, Homo sapiens
tcgagtgcccagttatgaccctc

SEQ ID NO: 625 - DNA, 29 bp, Homo sapiens
aaggtgatcctcccaaacttcctggccaa

SEQ ID NO: 626 - DNA, 25 bp, Homo sapiens
ttatcatctggaacccatctccacc

SEQ ID NO: 627 - DNA, 24 bp, Homo sapiens
gttcagatgtgcaaggataagcgg

SEQ ID NO: 628 - DNA, 29 bp, Homo sapiens
cccggaacggcactgttcacctttatctg

SEQ ID NO: 629 - DNA, 22 bp, Homo sapiens
atggtgctgacgtgtagagcgg

SEQ ID NO: 630 - DNA, 22 bp, Homo sapiens
ggtgagcttagactcccgggtg

SEQ ID NO: 631 - DNA, 30 bp, Homo sapiens
acatggtggagccatcccaacacatattcg

SEQ ID NO: 632 - DNA, 25 bp, Homo sapiens
gacagcagagttcatgaatcgagga

SEQ ID NO: 633 - DNA, 24 bp, Homo sapiens
aggggatctaccaccacactggtc

SEQ ID NO: 634 - DNA, 30 bp, Homo sapiens
aatcatgctgttctgcttgtgggctatggc

SEQ ID NO: 635 - DNA, 24 bp, Homo sapiens
atccatcccagaggctgagtcagt

SEQ ID NO: 636 - DNA, 23 bp, Homo sapiens
tttaagaatgcgcttgctgctca

SEQ ID NO: 637 - DNA, 30 bp, Homo sapiens
ttgtgtcccagccacttgctttcttggaag

SEQ ID NO: 638 - DNA, 25 bp, Homo sapiens
gcaggttcatcttcctctttgagga

SEQ ID NO: 639 - DNA, 21 bp, Homo sapiens
atacctgtggccttgggcctc

SEQ ID NO: 640 - DNA, 30 bp, Homo sapiens
tgtcctgcgtgttgaaagatgataagccca

SEQ ID NO: 641 - DNA, 25 bp, Homo sapiens
ttgttgaagacaaatcgcttttcca

SEQ ID NO: 642 - DNA, 21 bp, Homo sapiens
acctctaccacgccctcccag

SEQ ID NO: 643 - DNA, 30 bp, Homo sapiens
attctgcgggtgtccaagacactgagatgg

SEQ ID NO: 644 - DNA, 25 bp, Homo sapiens
gcagcactgagtccagatgtctacg

SEQ ID NO: 645 - DNA, 21 bp, Homo sapiens
cctcttcatggtggccacagc

SEQ ID NO: 646 - DNA, 29 bp, Homo sapiens
atctgcatcctgctcaacctcgtggagct

SEQ ID NO: 647 - DNA, 19 bp, Homo sapiens
ccttgctgccaggcactcg

SEQ ID NO: 648 - DNA, 19 bp, Homo sapiens
cctgctggagggcgaggag

SEQ ID NO: 649 - DNA, 29 bp, Homo sapiens
gggctgtgaatgtctgtgtcagcagctcc

SEQ ID NO: 650 - DNA, 20 bp, Homo sapiens
gggagcctgacacgcagagg

SEQ ID NO: 651 - DNA, 24 bp, Homo sapiens
cagagacactcaagatgcccttgc

SEQ ID NO: 652 - DNA, 28 bp, Homo sapiens
tagccaaccacgccaatgacaccatgaa

SEQ ID NO: 653 - DNA, 20 bp, Homo sapiens
acccgaccaggctgcacaat

SEQ ID NO: 654 - DNA, 24 bp, Homo sapiens
ggagctagaggctaccaggcaaaa

SEQ ID NO: 655 - DNA, 29 bp, Homo sapiens
actgttgctgtccacagccatgagccact

SEQ ID NO: 656 - DNA, 23 bp, Homo sapiens
ccaactgtgcaccatcactgagg

SEQ ID NO: 657 - DNA, 22 bp, Homo sapiens
tgatgggttcaccatccaggtg

SEQ ID NO: 658 - DNA, 26 bp, Homo sapiens
gaatctctttcgaggtgctggccgcc

SEQ ID NO: 659 - DNA, 24 bp, Homo sapiens
cacccagcaatgcttactcagagc

SEQ ID NO: 660 - DNA, 25 bp, Homo sapiens
atgtgcttggtttcctagaagccaa

SEQ ID NO: 661 - DNA, 30 bp, Homo sapiens
ttgcagccaatgaagagaatcggaagtgga

SEQ ID NO: 662 - DNA, 22 bp, Homo sapiens
gggtaacctgtggctggtcgac

SEQ ID NO: 663 - DNA, 18 bp, Homo sapiens
tgctgggctccattgggc

SEQ ID NO: 664 - DNA, 25 bp, Homo sapiens
cgtcggcaacaacctgctggtgctc

SEQ ID NO: 665 - DNA, 20 bp, Homo sapiens
ggaggtgagtgggagtgcgg

SEQ ID NO: 666 - DNA, 22 bp, Homo sapiens
ggaagccagtgaaggtggagga

SEQ ID NO: 667 - DNA, 29 bp, Homo sapiens
aatgatcgtgtgcggaacctgcaaagtga

SEQ ID NO: 668 - DNA, 16 bp, Homo sapiens
cccgggccaggatccg

SEQ ID NO: 669 - DNA, 25 bp, Homo sapiens
gttctggacctggagttgaaaggtg

SEQ ID NO: 670 - DNA, 28 bp, Homo sapiens
cagctatcgtgaagtgcgccacaagcaa

SEQ ID NO: 671 - DNA, 25 bp, Homo sapiens
gaagcttctctgcaaagaaagctgg

SEQ ID NO: 672 - DNA, 19 bp, Homo sapiens
agcgcagcagctctgctgg

SEQ ID NO: 673 - DNA, 30 bp, Homo sapiens
tgctgcaaactccagatcattcccacactg

SEQ ID NO: 674 - DNA, 24 bp, Homo sapiens
catcatcagacagagcacgaagca

SEQ ID NO: 675 - DNA, 25 bp, Homo sapiens
tctgtcctcctaagaaatctgccca

SEQ ID NO: 676 - DNA, 29 bp, Homo sapiens
cctgagtgccagagtgactggcagtgtcc

SEQ ID NO: 677 - DNA, 21 bp, Homo sapiens
ggatccaggcatttgatgcca

SEQ ID NO: 678 - DNA, 25 bp, Homo sapiens
acctatgatctgaagagcgtcctgg

SEQ ID NO: 679 - DNA, 28 bp, Homo sapiens
aagctctccaaggccgtgcataaggctg

SEQ ID NO: 680 - DNA, 22 bp, Homo sapiens
cctttctcgtcgatggtcagca

SEQ ID NO: 681 - DNA, 23 bp, Homo sapiens
ctgcacgctatagcaacgtcagc

SEQ ID NO: 682 - DNA, 30 bp, Homo sapiens
gcattgaggactcattcgccatggagaaga

SEQ ID NO: 683 - DNA, 21 bp, Homo sapiens
gagtgctgccacatggaggct

SEQ ID NO: 684 - DNA, 23 bp, Homo sapiens
agctctccaatcacaggcagacg

SEQ ID NO: 685 - DNA, 29 bp, Homo sapiens
gggcaaatatggccaaacagattggagca

SEQ ID NO: 686 - DNA, 24 bp, Homo sapiens
tccgactgtaaagctgagcattcg

SEQ ID NO: 687 - DNA, 25 bp, Homo sapiens
gcagagttattggaaaaggaggcaa

SEQ ID NO: 688 - DNA, 30 bp, Homo sapiens
ttgttgtccctcgtgaccagacacctgatg

SEQ ID NO: 689 - DNA, 24 bp, Homo sapiens
acctggcaagcatagaagtgacca

SEQ ID NO: 690 - DNA, 24 bp, Homo sapiens
tcatcttctgtgtcattgccctcc

SEQ ID NO: 691 - DNA, 30 bp, Homo sapiens
ggtcttcgtgttccagctcttcaccatgga

SEQ ID NO: 692 - DNA, 23 bp, Homo sapiens
cctgagaggaagaaccggtttcc

SEQ ID NO: 693 - DNA, 25 bp, Homo sapiens
acatcaagggcgagtctctattcca

SEQ ID NO: 694 - DNA, 17 bp, Homo sapiens
ggccgcggcggcctgga

SEQ ID NO: 695 - DNA, 15 bp, Homo sapiens
ccgcgcacgcgcaag

SEQ ID NO: 696 - DNA, 17 bp, Homo sapiens
acccagtgccaggccgc

SEQ ID NO: 697 - DNA, 24 bp, Homo sapiens
cctccccaggccaggaggtgcatc

SEQ ID NO: 698 - DNA, 19 bp, Homo sapiens
caagtgctgccagaggccg

SEQ ID NO: 699 - DNA, 23 bp, Homo sapiens
cagagctgctggaactacggctt

SEQ ID NO: 700 - DNA, 25 bp, Homo sapiens
tcctgctcctcggacgagctccctg

SEQ ID NO: 701 - DNA, 20 bp, Homo sapiens
agccgccagacttggtgagg

SEQ ID NO: 702 - DNA, 21 bp, Homo sapiens
acgtggcaccaaccatcatcc

SEQ ID NO: 703 - DNA, 24 bp, Homo sapiens
ccatgtaccgtcctcggccagcca

SEQ ID NO: 704 - DNA, 23 bp, Homo sapiens
agtcgaacaccaagagggtgtcg

SEQ ID NO: 705 - DNA, 20 bp, Homo sapiens
ggctcattggtggcctggag

SEQ ID NO: 706 - DNA, 29 bp, Homo sapiens
gatgcgagatggaggctcagaaccaggag

SEQ ID NO: 707 - DNA, 22 bp, Homo sapiens
gtagcgatctcctgctccagcc

SEQ ID NO: 708 - DNA, 23 bp, Homo sapiens
gttcatgcagctgcactttccaa

SEQ ID NO: 709 - DNA, 29 bp, Homo sapiens
accagtcacagcaggaggagtcgcaaaca

SEQ ID NO: 710 - DNA, 24 bp, Homo sapiens
aagcagtcttgttggtttccagca

SEQ ID NO: 711 - DNA, 25 bp, Homo sapiens
acagaagagcaactgagatcgagcc

SEQ ID NO: 712 - DNA, 30 bp, Homo sapiens
agagatgtgcctcgaaccacacaaagcacc

SEQ ID NO: 713 - DNA, 19 bp, Homo sapiens
gttcttgcaggaggcccgg

SEQ ID NO: 714 - DNA, 25 bp, Homo sapiens
cctggaaaatgtgcctgtgaatgta

SEQ ID NO: 715 - DNA, 30 bp, Homo sapiens
ccaccaccaaacatgcagctgttacagacg

SEQ ID NO: 716 - DNA, 21 bp, Homo sapiens
caagccttctggcggttcgta

SEQ ID NO: 717 - DNA, 20 bp, Homo sapiens
ctggaatgcaccccaggctc

SEQ ID NO: 718 - DNA, 21 bp, Homo sapiens
cacctgggccaggcccgcatc

SEQ ID NO: 719 - DNA, 19 bp, Homo sapiens
gcactcgttgctgggcagc

SEQ ID NO: 720 - DNA, 22 bp, Homo sapiens
aatgggggcttgattaaaggcc

SEQ ID NO: 721 - DNA, 30 bp, Homo sapiens
tttggacaggcacggatggtgacaactaca

SEQ ID NO: 722 - DNA, 22 bp, Homo sapiens
aggaagcagacagtgatggggc

SEQ ID NO: 723 - DNA, 18 bp, Homo sapiens
gacgccaagttccggcga

SEQ ID NO: 724 - DNA, 26 bp, Homo sapiens
cgcatcaccgtttgcggaaagacgtc

SEQ ID NO: 725 - DNA, 20 bp, Homo sapiens
cccaaacacctccttggcca

SEQ ID NO: 726 - DNA, 20 bp, Homo sapiens
ctgcgagtggcactgctgct

SEQ ID NO: 727 - DNA, 22 bp, Homo sapiens
gctcctggtagccgctggccgg

SEQ ID NO: 728 - DNA, 17 bp, Homo sapiens
gacgctcctgctgcgcg

SEQ ID NO: 729 - DNA, 25 bp, Homo sapiens
cgttgctgtggacatattgattgct

SEQ ID NO: 730 - DNA, 28 bp, Homo sapiens
tcatgattctgggcttcctgggatgctg

SEQ ID NO: 731 - DNA, 24 bp, Homo sapiens
aacaacagaagcatgcagcgactt

SEQ ID NO: 732 - DNA, 25 bp, Homo sapiens
ccagcagcaaattaatcaacagcag

SEQ ID NO: 733 - DNA, 27 bp, Homo sapiens
ctccagctgcagcagctgcaacacatg

SEQ ID NO: 734 - DNA, 23 bp, Homo sapiens
ggagaaggctgagactggtgctg

SEQ ID NO: 735 - DNA, 21 bp, Homo sapiens
gcctgtcagagcctgccaaga

SEQ ID NO: 736 - DNA, 29 bp, Homo sapiens
tcacagatgttgtgaaggtcctgggcctg

SEQ ID NO: 737 - DNA, 18 bp, Homo sapiens
tgctggctcctgggtggg

SEQ ID NO: 738 - DNA, 23 bp, Homo sapiens
tcaaggtatttggtcccggaaca

SEQ ID NO: 739 - DNA, 29 bp, Homo sapiens
caacttgatgcagatgtttcccccaagcc

SEQ ID NO: 740 - DNA, 24 bp, Homo sapiens
agccttctggagctttgtttcagc

SEQ ID NO: 741 - DNA, 25 bp, Homo sapiens
ctgaaacattcaccttccatgcaga

SEQ ID NO: 742 - DNA, 30 bp, Homo sapiens
tgcacttgttgagctcgtgaaacacaagcc

SEQ ID NO: 743 - DNA, 25 bp, Homo sapiens
agctttcagttgctcttttgttgcc

SEQ ID NO: 744 - DNA, 25 bp, Homo sapiens
attgtcctgctggtaattgggctaa

SEQ ID NO: 745 - DNA, 30 bp, Homo sapiens
tcccttatgaacaaggagcaccttgtgcca

SEQ ID NO: 746 - DNA, 25 bp, Homo sapiens
attggtgcatagtccatcgtcacag

SEQ ID NO: 747 - DNA, 25 bp, Homo sapiens
gctgcacaagcagaagtcatcagac

SEQ ID NO: 748 - DNA, 27 bp, Homo sapiens
cagttcagagttcagcccgggctgagg

SEQ ID NO: 749 - DNA, 19 bp, Homo sapiens
acagcgatgatggccgtgc

SEQ ID NO: 750 - DNA, 23 bp, Homo sapiens
tgagagcgaatgtcgttgctgag

SEQ ID NO: 751 - DNA, 29 bp, Homo sapiens
aaccagattcttggcagaaggtggcatgc

SEQ ID NO: 752 - DNA, 23 bp, Homo sapiens
tttagcctgctcttcacgggaga

SEQ ID NO: 753 - DNA, 21 bp, Homo sapiens
cccaccaggcaaagagggact

SEQ ID NO: 754 - DNA, 22 bp, Homo sapiens
ggccctcagggccctcctggct

SEQ ID NO: 755 - DNA, 20 bp, Homo sapiens
ccaacggtgccctgaagtcc

SEQ ID NO: 756 - DNA, 25 bp, Homo sapiens
aagcaagcatgtcatctatgctcca

SEQ ID NO: 757 - DNA, 29 bp, Homo sapiens
gcagccacaacaagtatgcaggggagtca

SEQ ID NO: 758 - DNA, 21 bp, Homo sapiens
caggccttggaagggtccact

SEQ ID NO: 759 - DNA, 25 bp, Homo sapiens
caccatgctaggtaacaagcgactg

SEQ ID NO: 760 - DNA, 23 bp, Homo sapiens
ctgctcgtgtgcctgggtgcgct

SEQ ID NO: 761 - DNA, 18 bp, Homo sapiens
cgggttgtccggcttgga

SEQ ID NO: 762 - DNA, 24 bp, Homo sapiens
tcaacatcttcgcaatccatcaca

SEQ ID NO: 763 - DNA, 28 bp, Homo sapiens
ccctcagtctggccagaccctgaggtct

SEQ ID NO: 764 - DNA, 19 bp, Homo sapiens
tgcccgatgcagttcctgg

SEQ ID NO: 765 - DNA, 25 bp, Homo sapiens
caaggaactcgatcgtatcattgca

SEQ ID NO: 766 - DNA, 30 bp, Homo sapiens
ccacatcctgctcaagacgcttctaccagc

SEQ ID NO: 767 - DNA, 22 bp, Homo sapiens
aataggctgcacggagtccagg

SEQ ID NO: 768 - DNA, 25 bp, Homo sapiens
gagatcatgaaaggcaaccatgtga

SEQ ID NO: 769 - DNA, 30 bp, Homo sapiens
tacaaggagccatcactgcacgatctcacg

SEQ ID NO: 770 - DNA, 19 bp, Homo sapiens
ggtcccgcttccagatcgg

SEQ ID NO: 771 - DNA, 25 bp, Homo sapiens
aagattggatcaggaccatgtgagg

SEQ ID NO: 772 - DNA, 30 bp, Homo sapiens
ggattatggtggcccacttgtttgtgagca

SEQ ID NO: 773 - DNA, 25 bp, Homo sapiens
accaggaacaatgacaccaagaacc

SEQ ID NO: 774 - DNA, 24 bp, Homo sapiens
tggacattcttttggtggagcaac

SEQ ID NO: 775 - DNA, 30 bp, Homo sapiens
gatgtggtattgccctggatgcatggatgt

SEQ ID NO: 776 - DNA, 25 bp, Homo sapiens
gaggggctgaggaattctggaatat

SEQ ID NO: 777 - DNA, 19 bp, Homo sapiens
gacctgcccacccaggagc

SEQ ID NO: 778 - DNA, 26 bp, Homo sapiens
agcactggggaccacctgctacgcct

SEQ ID NO: 779 - DNA, 25 bp, Homo sapiens
aagaactcctctggttcaatgctgc

SEQ ID NO: 780 - DNA, 24 bp, Homo sapiens
gaatggtgcagtagaaatcgctcg

SEQ ID NO: 781 - DNA, 29 bp, Homo sapiens
gctcgcggggacagtactttggagagctt

SEQ ID NO: 782 - DNA, 18 bp, Homo sapiens
ggcgtgggcagaagctgc

SEQ ID NO: 783 - DNA, 23 bp, Homo sapiens
gagtggcctacagatggcgctag

SEQ ID NO: 784 - DNA, 30 bp, Homo sapiens
acggactccttcctccctatgcttcttgcc

SEQ ID NO: 785 - DNA, 21 bp, Homo sapiens
atacggctcgtgctgcgtctc

SEQ ID NO: 786 - DNA, 25 bp, Homo sapiens
gttcaagtccaatgaagggaacagc

SEQ ID NO: 787 - DNA, 30 bp, Homo sapiens
gctagagggttccaggtcccatacgtgaca

SEQ ID NO: 788 - DNA, 25 bp, Homo sapiens
agagcctgccatctcgaactatgtc

SEQ ID NO: 789 - DNA, 24 bp, Homo sapiens
tcaccatacctaagcagcaacgct

SEQ ID NO: 790 - DNA, 29 bp, Homo sapiens
atgggaaaggaatcatagcccatgccacc

SEQ ID NO: 791 - DNA, 25 bp, Homo sapiens
tcacttggtttatctggcattgtgg

SEQ ID NO: 792 - DNA, 25 bp, Homo sapiens
agttgctgtggaggaaattcgtgat

SEQ ID NO: 793 - DNA, 30 bp, Homo sapiens
ataacagaaagtccttccgccttcgtcgca

SEQ ID NO: 794 - DNA, 25 bp, Homo sapiens
gtttgttgaaacccagcaagaggtc

SEQ ID NO: 795 - DNA, 25 bp, Homo sapiens
atggaagcttgaaggattccacaaa

SEQ ID NO: 796 - DNA, 30 bp, Homo sapiens
tccaacccaggaggaaagacagatgaaccc

SEQ ID NO: 797 - DNA, 25 bp, Homo sapiens
tgatggcttccaaataggcttctgt

SEQ ID NO: 798 - DNA, 22 bp, Homo sapiens
cgccagctgctacatcctgaaa

SEQ ID NO: 799 - DNA, 30 bp, Homo sapiens
tcccctgttcaacatagatgcctgtggagg

SEQ ID NO: 800 - DNA, 24 bp, Homo sapiens
tcgtatgtgtcactccatgcctca

SEQ ID NO: 801 - DNA, 23 bp, Homo sapiens
gaagcgctacgcctacaagttcg

SEQ ID NO: 802 - DNA, 22 bp, Homo sapiens
cttccacgggatcgcccaggcc

SEQ ID NO: 803 - DNA, 22 bp, Homo sapiens
ccatgtacgggaggtctgaggg

SEQ ID NO: 804 - DNA, 25 bp, Homo sapiens
tgttctgagaatgggactgtcgatg

SEQ ID NO: 805 - DNA, 30 bp, Homo sapiens
tctggcaaaaaacatcacacctcaaaggca

SEQ ID NO: 806 - DNA, 25 bp, Homo sapiens
tctgtgcagcagcaattcatcctat

SEQ ID NO: 807 - DNA, 25 bp, Homo sapiens
ccatttgaggtagaaaatgccctga

SEQ ID NO: 808 - DNA, 30 bp, Homo sapiens
tcagttgcagagtcagctgttgtcagcagc

SEQ ID NO: 809 - DNA, 23 bp, Homo sapiens
acctctcctctgatggggtctgg

SEQ ID NO: 810 - DNA, 25 bp, Homo sapiens
gccataacaatctcctctgctctgc

SEQ ID NO: 811 - DNA, 30 bp, Homo sapiens
gcaggaacagtgtgggtgaattgctatggc

SEQ ID NO: 812 - DNA, 20 bp, Homo sapiens
ggggcactgggcacttacca

SEQ ID NO: 813 - DNA, 24 bp, Homo sapiens
tccccgggaaacagagtttctaga

SEQ ID NO: 814 - DNA, 30 bp, Homo sapiens
cgccaccactactcaaagaagtggcacaga

SEQ ID NO: 815 - DNA, 25 bp, Homo sapiens
ggacaggctagtgcctattttgtgg

SEQ ID NO: 816 - DNA, 23 bp, Homo sapiens
ttcctggctctcgtttgctttgt

SEQ ID NO: 817 - DNA, 28 bp, Homo sapiens
ttcattgcttccggaaggccattcatga

SEQ ID NO: 818 - DNA, 23 bp, Homo sapiens
cagccgattctgaacctttcgag

SEQ ID NO: 819 - DNA, 23 bp, Homo sapiens
tccaggcaaccaaagaggtgaac

SEQ ID NO: 820 - DNA, 26 bp, Homo sapiens
ttgcaccagggaagagacaagccgga

SEQ ID NO: 821 - DNA, 24 bp, Homo sapiens
gcggtaggaatccttctccatcag

SEQ ID NO: 822 - DNA, 25 bp, Homo sapiens
cagaggtagccaagaaggaaccaga

SEQ ID NO: 823 - DNA, 28 bp, Homo sapiens
agcagagaagaaggaggcagcaccggag

SEQ ID NO: 824 - DNA, 22 bp, Homo sapiens
aggcttcttggccttctcctcc

SEQ ID NO: 825 - DNA, 24 bp, Homo sapiens
tggcgtcagaggacaatttcaaac

SEQ ID NO: 826 - DNA, 30 bp, Homo sapiens
tccgtggtggtcacatcctaccatgtcaag

SEQ ID NO: 827 - DNA, 24 bp, Homo sapiens
tctgcagcaacaatgagcttcatg

SEQ ID NO: 828 - DNA, 24 bp, Homo sapiens
catcatgatcaaccagtgaagccc

SEQ ID NO: 829 - DNA, 25 bp, Homo sapiens
gagccaagcaccttcgggttgcagc

SEQ ID NO: 830 - DNA, 24 bp, Homo sapiens
ggtactggaaccaggtgaggtcgt

SEQ ID NO: 831 - DNA, 23 bp, Homo sapiens
gccctgaccattgcaggattaaa

SEQ ID NO: 832 - DNA, 30 bp, Homo sapiens
cgcttcacaagaagacgggatcagaagcaa

SEQ ID NO: 833 - DNA, 24 bp, Homo sapiens
ttcctcctttgctgccttgatgta

SEQ ID NO: 834 - DNA, 25 bp, Homo sapiens
ttccaggatattcagaggatgccat

SEQ ID NO: 835 - DNA, 28 bp, Homo sapiens
gcgaggatccatggtgttccagcctctt

SEQ ID NO: 836 - DNA, 23 bp, Homo sapiens
ttggctttctctgcatcccagtt

SEQ ID NO: 837 - DNA, 25 bp, Homo sapiens
gtggtgatgatgaagacggtgaaga

SEQ ID NO: 838 - DNA, 27 bp, Homo sapiens
ccaccaagaaggaaaagcagacggcga

SEQ ID NO: 839 - DNA, 25 bp, Homo sapiens
agtgaggtggtgcattagctgacaa

SEQ ID NO: 840 - DNA, 22 bp, Homo sapiens
cacaggctcagctggtgcagtt

SEQ ID NO: 841 - DNA, 24 bp, Homo sapiens
tgctcgccatcacgcacaccatga

SEQ ID NO: 842 - DNA, 19 bp, Homo sapiens
acacggtttcacgacggcg

SEQ ID NO: 843 - DNA, 22 bp, Homo sapiens
tggcgataccaggaattcagca

SEQ ID NO: 844 - DNA, 26 bp, Homo sapiens
cagagcatgcctcgagaagggcatgg

SEQ ID NO: 845 - DNA, 25 bp, Homo sapiens
ctgtgaagacctcctccgtagatgg

SEQ ID NO: 846 - DNA, 15 bp, Homo sapiens
cgcgtcggggctgcc

SEQ ID NO: 847 - DNA, 18 bp, Homo sapiens
aggcgtcgcgctggcgcg

SEQ ID NO: 848 - DNA, 20 bp, Homo sapiens
aagcgcttctcgcggttctg

SEQ ID NO: 849 - DNA, 25 bp, Homo sapiens
tcatgttagcagccagtgttggaat

SEQ ID NO: 850 - DNA, 29 bp, Homo sapiens
tgtgcagataaatcacagccaggagggca

SEQ ID NO: 851 - DNA, 24 bp, Homo sapiens
ccgagggaattctgtatcctgtcc

SEQ ID NO: 852 - DNA, 25 bp, Homo sapiens
gttcagcaaccagggagtctgtacc

SEQ ID NO: 853 - DNA, 29 bp, Homo sapiens
ctgctgcaaagcagtcaatgaccttggga

SEQ ID NO: 854 - DNA, 24 bp, Homo sapiens
cctccagtttgcattcaatctcca

SEQ ID NO: 855 - DNA, 25 bp, Homo sapiens
ccaaatcccactcaaacctttcaac

SEQ ID NO: 856 - DNA, 27 bp, Homo sapiens
aatgagcacgctttcctaccgcccctc

SEQ ID NO: 857 - DNA, 22 bp, Homo sapiens
tgcaggcttcttggtggatgag

SEQ ID NO: 858 - DNA, 20 bp, Homo sapiens
caaggtgggttcctgccagg

SEQ ID NO: 859 - DNA, 30 bp, Homo sapiens
gatgctgactgctttgagaaggccagcaag

SEQ ID NO: 860 - DNA, 23 bp, Homo sapiens
aatcctctcaggtgccagcttga

SEQ ID NO: 861 - DNA, 25 bp, Homo sapiens
aggaactgaggaggctcttccttgt

SEQ ID NO: 862 - DNA, 27 bp, Homo sapiens
tgatgtggctcctgacctacgttggcg

SEQ ID NO: 863 - DNA, 20 bp, Homo sapiens
ccacagccatgagcagcagg

SEQ ID NO: 864 - DNA, 22 bp, Homo sapiens
gaactgcccaagctggagaagc

SEQ ID NO: 865 - DNA, 19 bp, Homo sapiens
tgccacggcggagcgcgtc

SEQ ID NO: 866 - DNA, 18 bp, Homo sapiens
tcccgcatggcgttctcc

SEQ ID NO: 867 - DNA, 23 bp, Homo sapiens
tcttcagtgggaggtccaaatgc

SEQ ID NO: 868 - DNA, 29 bp, Homo sapiens
gccagaggagtgctcagcaagcaggaagt

SEQ ID NO: 869 - DNA, 25 bp, Homo sapiens
tggtacggtgaccagtctcacagtc

SEQ ID NO: 870 - DNA, 24 bp, Homo sapiens
ggcaattataacacagggctgcaa

SEQ ID NO: 871 - DNA, 30 bp, Homo sapiens
agcagggagtggaatggaaaccatacaggc

SEQ ID NO: 872 - DNA, 24 bp, Homo sapiens
tcttgtccaccatggaggatttca

SEQ ID NO: 873 - DNA, 24 bp, Homo sapiens
caattggatttctgctcggattca

SEQ ID NO: 874 - DNA, 25 bp, Homo sapiens
tgactgttggcccacccattgcagg

SEQ ID NO: 875 - DNA, 25 bp, Homo sapiens
cacatcataggagcccagtttgtca

SEQ ID NO: 876 - DNA, 21 bp, Homo sapiens
cctcgccatgaagctgctgat

SEQ ID NO: 877 - DNA, 21 bp, Homo sapiens
tgctggcggccctcctcctgc

SEQ ID NO: 878 - DNA, 24 bp, Homo sapiens
tcaaccatgtcctccaggagtttg

SEQ ID NO: 879 - DNA, 23 bp, Homo sapiens
cctcaagaccctggctgactttg

SEQ ID NO: 880 - DNA, 22 bp, Homo sapiens
gtgcccttccgcacggtgtccg

SEQ ID NO: 881 - DNA, 23 bp, Homo sapiens
tgctgcatcttgatggactccag

SEQ ID NO: 882 - DNA, 25 bp, Homo sapiens
ggcatttttcaggtaaccctcactg

SEQ ID NO: 883 - DNA, 30 bp, Homo sapiens
tgctctttgctcagcatcgctacatctccc

SEQ ID NO: 884 - DNA, 24 bp, Homo sapiens
ctgcaatgtcactgccaattagca

SEQ ID NO: 885 - DNA, 15 bp, Homo sapiens
gctgcggggtggccg

SEQ ID NO: 886 - DNA, 26 bp, Homo sapiens
tgatcaccacctgttacggagggcgg

SEQ ID NO: 887 - DNA, 17 bp, Homo sapiens
ctcggccaccctgcggt

SEQ ID NO: 888 - DNA, 17 bp, Homo sapiens
agccgagccacatcgct

SEQ ID NO: 889 - DNA, 19 bp, Homo sapiens
gtgaccaggcgcccaatac

SEQ ID NO: 890 - DNA, 28 bp, Homo sapiens
caaatccgttgactccgaccttcacctt

SEQ ID NO: 891 - DNA, 21 bp, Artificial Sequence
  Synthesized Oligonucleotide.
cagggcaacaucuacaagctt

SEQ ID NO: 892 - DNA, 21 bp, Artificial Sequence
  Synthesized Oligonucleotide.
gcaaguguacgacgcgcactt

SEQ ID NO: 893 - DNA, 21 bp, Artificial Sequence
  Synthesized Oligonucleotide.
ccgcuugcugucugcccuctt

SEQ ID NO: 894 - DNA, 21 bp, Artificial Sequence
  Synthesized Oligonucleotide.
caucugggcaguuguaccatt

SEQ ID NO: 895 - DNA, 21 bp, Artificial Sequence
  Synthesized Oligonucleotide.
cuacgcacuccuuugacaatt

SEQ ID NO: 896 - DNA, 21 bp, Artificial Sequence
  Synthesized Oligonucleotide.
aguguggaucugcagccautt

SEQ ID NO: 897 - DNA, 21 bp, Artificial Sequence
  Synthesized Oligonucleotide.
guuccugacgguguuccugtt

SEQ ID NO: 898 - DNA, 21 bp, Artificial Sequence
  Synthesized Oligonucleotide.
uugcgggaauucucuuugctt

SEQ ID NO: 899 - DNA, 21 bp, Artificial Sequence
  Synthesized Oligonucleotide.
ggaagugguacugcuggactt

SEQ ID NO: 900 - DNA, 21 bp, Artificial Sequence
  Synthesized Oligonucleotide.
cuuccagaagcgccuguuctt

SEQ ID NO: 901 - DNA, 21 bp, Artificial Sequence
  Synthesized Oligonucleotide.
gagccccguaugcacugugtt

SEQ ID NO: 902 - DNA, 21 bp, Artificial Sequence
  Synthesized Oligonucleotide.
cuacaccuucaccguggagtt

SEQ ID NO: 903 - DNA, 21 bp, Artificial Sequence
  Synthesized Oligonucleotide.
gcuuguagauguugcccugtt

SEQ ID NO: 904 - DNA, 21 bp, Artificial Sequence
  Synthesized Oligonucleotide.
gugcgcgucguacacuugctt

SEQ ID NO: 905 - DNA, 21 bp, Artificial Sequence
  Synthesized Oligonucleotide.
gagggcagacagcaagcggtt

SEQ ID NO: 906 - DNA, 21 bp, Artificial Sequence
  Synthesized Oligonucleotide.
ugguacaacugcccagaugtt

SEQ ID NO: 907 - DNA, 21 bp, Artificial Sequence
  Synthesized Oligonucleotide.
uugucaaaggagugcguagtt

SEQ ID NO: 908 - DNA, 21 bp, Artificial Sequence
  Synthesized Oligonucleotide.
auggcugcagauccacacutt

SEQ ID NO: 909 - DNA, 21 bp, Artificial Sequence
  Synthesized Oligonucleotide.
caggaacaccgucaggaactt

SEQ ID NO: 910 - DNA, 21 bp, Artificial Sequence
  Synthesized Oligonucleotide.
gcaaagagaauucccgcaatt

SEQ ID NO: 911 - DNA, 21 bp, Artificial Sequence
  Synthesized Oligonucleotide.
guccagcaguaccacuucctt

SEQ ID NO: 912 - DNA, 21 bp, Artificial Sequence
  Synthesized Oligonucleotide.
gaacaggcgcuucuggaagtt
